United States Patent Application Publication US 2026/0191916 A1 - sequence listing, part 108

SEQ ID NO: 706 - DNA, 2254785 bp, Bifidobacterium bifidum
  source 1..2254785: mol_type = genomic DNA
atgtcggatgaccttctcggtccagccgggcaagccacgcggatatggtcggacacgctgcgtctgctcaagcagaatcccacgctgtcgccgcgcgacaagagctggcttgaaggagtcgtaccggaagcggtatatggcacgaccatcgtattgtgcgtaagcaacatggccacgcagcaagcgttgcagaatgaactcaatgcgccgctgctcaacgctttgaaaatcatatccggaaacgacatgttcccggcgttcaaaatcgtggctcctcaggtgtcccaaccggaaccgcagccgccggcatcccggcatcccgatactgcggcgaaaccgagcgaaccgttcccggcgaatccgtcgccgaccgtcgccgatctggctcaggaatcctacatgcccaacagcatgcagtcaatctcctccatcgattcgatttccgcggaaatgacggaggcgaatcagcaaccaggcgccacggctcctcgaatacccggcgagccgagttttccggtccgacagcagaaggtgatgcgcgatccggaaacccatctgaacaaaaactcgacgttcgacacgttcgttcccggtgattccaaccgtttcgcacgcactgtcgcgcttgcggtcgccgagggaaccgggcaggaattcaacccgttgtgtatctacggcggatcgggactgggcaagacccacctgctcaacgccatcggcaactatgcattggtcaaggatcccacgctcaaggtccgatacgtcaacagcgaggaattcaccaacgaattcatcgaggcactgcagaccccggcccagagccagaaccgcatcgcagaattcaaccgccgataccgcgaggtcgacgtgttgctcatcgacgacatccagttcctcggcggcaaggaagcgaccctcgaacagttcttccacacgttcaacgcgctgcatcaggccaacaagcgtatcgtcatcgcgtccgatgtcgcgcccaagaacctcaagggcttcgaggcacgactcatctcgcgtttcgactccggactcaccgtcgatgtcaagccgcctgatcttgagacccgcatcgctattttgcgcatgatggcttcgatgaacggcacttcgacaccgaatgacgtgctgaatctgatcgcggagcgcttcaccgagaacatccgcgagctggaaggcgccctgattcgcgtgagcgcagtggcatcgctgagcagtcagccggtgacccgcgcgcttgccgagcagacgctgcaggacttcttcaccaccgacgtggaaatcaagccgaccgacatcatcgggcagacggcgaagtacttccatctgacattcgacgacatcgtcgggcgcgcgcgaacgaaaaacatcgcgctggcccgtcaggtcgccatgtatcttgcccgtgagatgaccagcatgagcctggtcgatatcggcgaagtgttcggcggccgcgatcacaccacggtcatgcacgcgtatacccgcgtcagcgatgatatgcaggaaaaacctgaaatttacaactacgtgaccgagctgaccgcacgcctcaagcagcgcggcaatgagtgacgacagtcgttttctctcggctgtgcaatggtcccgtctggcacgatcgcgctgagacaccaaaaacgccttttttcgtcgctgtgcgtgattctgctggatgaaggcctgattcatcaccgtcgacaggacctatcagactcagataatatagacatacatatttaatctgtacaataaaacaggcgcaacacgccgaacgatctgctgattgaaggaaaagttatccacatgcttattcacaaatgtgggtagagcctgcggataacttgtggactactgcacattttttgtggatgaacagtggattaatccacaggaaatgtggacaattaaagcagttcgccgaaaatgtggataactcggtacttatgcacattttgtccggaaagttatccacataatctgtgggttactcagcccatataaacacaaggattcgcgcagttatccacactatccacagggcttattactacgactatcttatttctctttcgataaccgtcgtgatgataactcacttcgcgcatgagaaaaaacaatccgaacatgacccgctagaatgttgccaagcacatcgtgaaatgagggaacccatgaaagtagaaatcgattccgcggctctcgccgacgccgtagcctggacgacccgcgtcatcgacgcccgaccggcgagccccatccttgcaggtatccagctcgaagccatcgacggcacccttcaactgtccgcgttcaattacgagatttccgcccgtcaccacatcgaagccggtatcgacgaacccggaaccgcactggtactcggcaaactcctcgccgacatcaccaagtcactgcctgccgaaaagacctacctgtcgaccgacggctccaccatgaccatcaactcgggcaagtccacgttcaccatgcagctcatgcccgatgccgaatacccggatctgccggtcgtaccggcaaagctcggccaggtcgacgcacccacgttcatccaagccgtaacccaggccagcgtcgcggtctcccgcgaggagaaccgcccggtgctgaccggcgtgcgcatgcagttcgatggcgacaaagtcaccatgacctcgaccgaccgtttccgcctgtcccgtgccacgttcacctggacgccgcagaacatcgacacctctacgaccacactggtgcgcggatccctgctgcgcgacgtcgcccgcgcacttgacgatcaccagaacgtcgtcatcgatttcgacgccgacaaccccacgctgctcggtttcgagaacgccggacgcgtctcgacatcccagctgatcgacggcgaattccctgcggtcgaccgcctgttcgccgacgaatacccgattcaggccgtcatcgacaagcagctgctgatcgccgccatcaagcgcgtcgcgctggtcgccgaacgcaacgccccgatccgcatggtgttctccggccaggaagtcaccctgtccgccggcgccgtggacgaagcccaggcgcaggaaatgctggacatcgacatggacggcgaggacatcaccgtcgcgttcaacccgtcctacctgatcgaaggcctgagcgccatcactgagccgttcgtgcgcatgaagatgaccacggccgtcaagcccgtcgaattcaacggccagcaggaggcggacagcgacgaatcgatggattaccgctatctgctcgtcccgatgcgtttcaacagctgagcacgacggctgaacactggaatccgaatcgaatcgccggcaccgccgaaacacacggtgccggcgatgacatgacaggagcccatcttgtacatttcgcgtcttgcgcttgaccattaccggtcatggaaccattgcatgctcgacctcacgccgggcatcaacatcctgcagggggcgaacgggcttgggaaaaccaacatcgtcgaagcgatagaagtgctgtccacgggcctgagccatcgcacatccagctcggttccgctggtgcagcgcggcgaacatgcagcgacgatccgggccaatatcgaatccgtgacggatccggagcccgctgatgatggcgtcaataccagcgctgatgccgtggatatctcggacatgaaaccggtccggccgacacagaccaccacccttgaggccacgattgcggcacgcggcgccaaccgcgcccgcatcaacggcggacagtcgcggtatctgcgggagattctcggcacgctgccgaccgtgagcttcgccccggaggatcagcagcttgtggcgggcgaccccgccgtgcgccgctcgttcatcaaccaggtcgcctcgctgctgattcccggatatgcgaaccggttgcaatcattcacgcacgtcgccaagcaacgggcggcgttgctcaaacagctcggtcaatggcagcgtgcaggatccccgattgacgccgcgctcagcgggctggagatctggaccggacagttcatcgaggagggagtcgcgctcagccgtgacaggcagcgcatcatcgcggaactgaacaagtcgttcggcccgctgtatgccagattggccggtgtggcgggcgacttgccgtccaatgcggaaattcaggatgccgcgcaggatggtggtgagcaggcagcggtcgaatacgtgccgtcattcgacgagatccttggaacacaggcgcccgaaccgctgataagccagcatttccagcgcatctatcccggcgaggtgtctcgcggcgtcaatctgatcggcccgcaacgagatgacctgttggtgacgctcaatggcatgccggccagggaattcgcctccaacggcgagatgtggacgttggccctggcattgaagatggcacaataccaggccctctgcgagtatttcgacaccaggccggtggtgattctcgacgatgtgttcgctcagctcgacgaatcgcgccgcaccgagatcctgcgttttgccgcggctcaggatcaggtactgatcaccgcagccgcggaaagcgatattccgatactgccggcgaatgagtcggcagaatccggcgagataccggtgaaccgcatcgcagtggccgatctcaaacggcgcgacgaagcggatgccgagagggccggcgaacaatgaccgaaccccgcaagccgaatacgccgggcgggccgggcgggccgggggcaccgagcaggcccgacaagccgggcagcgcggtcaagccgggcaatgtacacgattcgcacgagccgatttgcgcgaccctgcatctcgaccagcgcaaactgcccgccacggtgttcgagcacatcgccaagatggcgggaggaaggcgtcagcggatgattgacgccgaggccgcatgggagaacttcggcaagccgggccgcgacccgagcaccttgggcagcgtaacggcgctgattgcgaataacggtcattggataccgtatctgaaaatcgcgcagctgcgcaatcactgggatcaggtggtcggaccggtcatcgcccagcattcgcaggtcatcgggctgcgcgacggagtcatgaccatccgtgccgattccgcggcttgggccacccagctcacctacctgattccgcagctggaacgtaccatcaaggagcgcctgcagggattggacgtccacaagatccaggtaacaggcccccgtgccgcgacatttcgcggctcaaggatgaagaggcgctaaattcgctcagagagccaaagtccccgtagacgggtaggattggcggataataggttcagcgcttagaaacccccgttattcgcgttttagagcgtatcgcccgcagaacaacctttcatgacgaaagaatatgcaggaaggaaaccgttagtggcagttcttgaatcggattccgaacatgaatcccgtgacgagtccggcatgcctgagcaggctccgggcagcggtctgacggcgagcagcgccgagcagcatgaccgcgaggtcgatgaagccatcgcccaggacgagctcgatgacgcccagcttgacgacaccttatcgcccgaccattatgacgccagcgacctgaaggtgctggaaggccttgaggcggtgcgcatccgcccgggcatgtacatcggctccaccggcccgcgcggtctgcaccacctggtctacgagatcgtcgacaactccgtcgacgaggcactggccggctacgccacgcatatcgaagtgacgatcctgccggacaacggcatccgcgtcgttgacgacggtcgaggcatcccggtcgacgaagttcccggcgaaggcgtctccggcgtcgagaccgtgatgaccaagctgcacgccggcggtaaattcggcggcggcggatacgcggtgtccggcggccttcacggtgtcggcatctccgtggtcaacgcgctgtcgacgcgagtcgatatcgaagtgcggcgccagggattccactggacccagacatacgtcaaccaacatccgacggcccgcctcgccaagggcgccccgatggccgaggatgagtcgaccggcacttccgtgacgttctggcccgatgcggcgatcttcgaaagcacggtatacgacttcgagacgctgcgctcccgcttccagcagatggcgttcctgaacaagggactgaagatttcactcaccgacctgcgcgagccggatctggccggcgacgaagtggccggcgatgacgattccaccgagccgaagcaccagagcgtgacttaccagtacatgaacggcatcaaggattatgtctcgtacctggtcaagtcccgcaaggccactcccgtcgaggaggatgtcatcgatttcgaggccgaagacctcaagatcggcatctcggccgaggtcgcgatgcagtggaccaccgcgtattccgaggctgtgcacacgttcgcgaacacgatctccaccacagaaggcggcacgcacgaagaaggcttccgtgcagcgctgacctcgctggtgaaccggtatgcgcgagacaagaacatcctcaaggagaaggatgacaacctctccggcgacgatgtgcgcgaaggcctgaccgccgtcgtgtccgtcaagctgaccactcctcagttcgaagggcagacgaagaccaagctcggcaactccgaggcgaagaccttcgtgcagcgcgtgatgaccgacaagctcggcgactggttcgacgcgcaccccgcagaggccaagaacatcatccagaaggccatcgaagcctcccgcgcccgcatcgcggcgaagaaagcccgtgagaacacccggcgcaagtcgattttcgagtcggccggcatgcccgacaagctcaaggactgccagtccagcaaccccgaagagtgcgagctgttcatcgtcgagggtgattcggcaggcggctccgccattcaagggcgaaacccggaaacgcaggccatcctgccgcttcgaggcaagattctcaacaccgaacgcgcctccatcgaccgcatgatgaagtccgacaccatcgagtcgctgatcaccgcggtcggtggcggctatggcgaggaattcgacgtgagcaaggtgcgctaccacaaggtcatcatcatggccgatgcagatgtggacggtgcccatatcgccacgctgaacctgacgctgttcttccgttacatgcgaccgatgatcaccgcaggatacgtgtatgtggccatgcctccgctgtaccgtctcaagtggacgcgcggcgatcatgattacgtgtacaccgaccgcgaacgcgacgagaaactcgcccagggcaaggccgcaggccggcagctgcccaagggcgaaggcatccagcgctacaagggtctgggcgagatgacctaccaggagctgtgggagaccaccatggatcctgagcaccgcatcctgaagcagattcacatcgaggatgccgcggcagcggacgagaccttctcgatgctgatgggcgacgacgtggaaccgcgccgtcttttcatccaacgcaatgccaaggatgtgcgtttcatcgacgcttaaggctctaatccaagccccgccggcgggggtcagcgcagctgactgggggggggtggtcccgatccacccgatgacagcgacagaaacgacgcccaacatacggtcgaacagattttaaccaaaggacaaccaagtggcagacgaaaacagcaacggcaccgacctgccggagcagaacgacgagcgtgccgaacactcgatggagcccatcagccctcaggccaacgaacagttggtcctcgacgacaatcgtgtggcccacaccgacatccagaaggagatgcgtcagtcgtacctcgactatgccatctccgtcatcgtcgaacgagcccttccggatgtgcgcgacggcatgaagccggtgcaccgccgcatcgtgtacgcgatgtatgacggcggctaccgtcctgatcgcggctattccaagtgcgcccgacccgtcgccgacgtgatgggcaactaccacccacacggcgacgccgcgatctacgattcgctggtgcgcatggcccagccgtggtcgatgcgatacacgctggtcgacgggcagggcaacttcggctcggccggtgacgacccgcccgcagccatgcgttacaccgagtgccgcatgatgccgcttgcgatggaaatggtgcgagacatcgacaaggacaccgtcgacttcgtgcccaactacgatggccgtacgcaggaacccaccgtgttgcccgcgcgcttcccgaacctgctggccaacggctcgtccggcatcgccgtcggcatggcgaccaacattccgccgcacaacatgcgcgagctggcggaaggcgtgcattggacgctcgatcatcccgaagcgagccatgaagagctgctgaacgcactcatcggcatcatcaagggaccggacttcccgaccggcgccacgatcctcggccacaagggcatcgagcaggcgtaccgcaccggccgcggcctgattacgatgcgcgcggtggtcaacaccgaggagatcaagggccgtatgtgcctggtggtcaccgagctgccgtatcaggtgaatcccgaccgtctggccgcttccatccgagaaggcgtgcgcgacggcaagatccagggcatcgccgacatgcgcgacgagacgtcgggccgtaccggccagcgactcgtgctcgtgctcaagcgcgacgccgtgccgaaggtcgtgctcaacaacctgtacaagcactcccagctgcagcagacgttcggcgcgaacatgctcgcgctggtcgacggcgtgccgcgcacgctgagcctcgacgccttcatccgccattgggtgaaccaccagctcgaagtcatcgaacgccgtacccgttacctcaagcgcgaggccgaggaacgcgaccacatcctgcagggcctgctcaaggccatggacgccatcgacgaggtcatccgcctcatccgctccagccagggccgcgaggacgcccggccgaagctgatggagttccttgacatcgatcaggtgcaggccgacgccatcctttccatgcagctggttcgactggccaacatggaacgccagaagatcatcgacgagcatgaggaactcatgcgcaagattgccgactacaacgacatcctcgccaagccggaacgccagcgtacgatcgtcggcgacgagctcgacgagatcgtcgcgaaatacggtgacgaacgtcgcacgaagatcctcccctactcgggcgagatgaacgtcgaagacctgatcgccgaggagaacgtggtggtcaccgtcacgcactccggcttcatcaagcgcaccaaggccaacgaatatcgcgcacagcatcgcggcggcaagggcatcaagggcgccaagctgcgtgaggatgacgtggtggatcacttcttcctcacgtccacgcataactggctgctgttcttcaccaacaagggccgcgtctaccgcatcaaggcgtacgagctgcccgaaggctcgcgcgattccaagggccagcacgtggcgaacctgctgcagttcggtcccgacgagacgattcagaccgtgctgtcgattccgaactacgaggtcgccaagtatctggtgcttgccacccgcaccggcaaggtcaagaagaccgcgctggccgagtacgattcgccgcgtcagggcggactcatcgcggttcgtctcgcggccgacgaggagaccggcaagcccacggacgagctgatcggcgccgcgctgtgcaacgccgcagacgacatcatcctcgtctccaagcagggcatgagcctcaagttcgcggcggacaacgaccagctgcgtccgatgggacgccagaccgccggcgtgcagggcatgaagttccgcggggatgacgaactgctcgccatggacgtggttccggaggactccaagcaggacctgctcgtggtcaccaatgagggcttcgccaagcgcaccgcgatcagcgaataccgactgcaggggcgtaacggcttcggcgtcaaggcggtacagctcgccgaaggtcgcggatcgctggtcggtgccctgatcgtaagcgaagacgatcaggtcatggcgatcatgaagtccggcaaagtgatccgttccaacgtcaccgaagtcaagcgcaccggccgcaccacgcagggcgtgacgctcgccaagcccgacaagggcgacgagattatctccatcgcccgcaacgaggaaaccggcgaagacgaagtcgagacgacggatgatacggctgcggccgcatccgcgaccacgtctcccgatacggccgaaaacactccggataccgcggatagcgtcgcatccggcagtgattcgggcgcggcatctgacgagaatgtgaacaacactgatgacgaggcataatcgtctcagaaaactggtagcctcggctaagagtcatcggggaacgacaaggagcaacgatgagtgacaacctcgaacccggacggaccgacatgttcgtgcccggtccgcatgacaatgcagaaccgcacgaaggtgtccgcgaaagcgcccctcgggtcgcgcgctctatttccaaccagccgcagtcggagagcgagccgcgcgccaacaaaacgcgtgcgtccctgcgttcgccgcgccgttcgacgccgcgcgcccgccgcatgaacctgtcgctgacccatgtgaacgcatggtccgtggcgaaggtgacgttcatgctgtcaatcgccggcgcgatcatcgaagtgcttgccgccgccctggtctggctgctgcttgacgcggtcggcgtgttcgaccagctgaacaatatcgtctcgtccaccggtctggccgccgacagcctgaacctgtccagcgtgttcagcctgtccacggtactgtcggtggtcaccattctggcgatcgtcggcgtcgtgctggtgacgctccttgccaccatcatcgcgctgctgtacaacgtgatcagcgcgctggtcggcggcgtacatatcactctgggcgacgactgatccaatcgaatccctgatacatcccgttacgaaccccgcggaggcaacgcccgcggggtttgtatatctcatcatcgccggcgcaggaaaagactacaccgccgcttcgtggaagccgtccgctcaggccttcaaggaggccaaggttcgtggcgttgccgctgattggcgacagcgccacatgaccgcgttgccggcgcgggtttgtcagcacatgacgacgaataatgagagttcccgatgctcgggagcccccattatgttgttgataggaaaatcacgctctcaaaactcgcagatacagaccatttttgttgaattcggccctgtatctgcgagttctgagagcgtgagctcgcgataatcaggccgtgaacctcaccgaagcccatgtgaccggtggcaacgaaacagtcatccgaccctcatcaagcgcggcggatagcggctgcaaggtgacgccgtccggctcatcggccgtattggtgcggtagatatcgtcgctgggcagcatctgcgagctggtgacggacggccactcccccagcctaggcaacgatgtcaggtcgattgtcacatcatgggcgttgtgctcgtcacggttgacgagcagaatcatgccttcgcgagtcttctggtcccaagtggccaccgcgaccgtgaagagccgtaaggccggcagcggcaccggttccgcatgggcacagtacacggacgagctcgccaccgcatcgaccaccgccgacacgaaggccggtgagccgcagtacgtgaccaccacgttcaccgtgcccaccgacgccgcgcctgaaggcgctctgtggctgagcttctccgacatgggcctcgccgatgacgccaacggctacatcgacgatgtggtgctcatccgctccgactccaagccgacgctgaagaccaccgcgttcacgccgaccgtcgtcgagggtgaaacctcctccgcatacgtggagctcgacggtcagcccgccgccaaggaggtctccgccaacaagaacgcaaccgtcgacgaagtggccaccgcactgaaaacctcaccgccgcacagaacgccctggccgagaagccgaagccggcgaccgtcgaatcgatcaaggtggccgcgaagcccgccaagaccgagtacacggtcggcgacacgttctccgccgatggtctgaaggtcgtcaaggtcatgtccgacaagaccgaaccaggaaagaagcctggcgcgcagaagcctgccggtcagcagaacgtctgtccaagaccggtgcctcggtggctggcgtggccggtttgcgttcctaagtgcgcgccgaaacgacgatcgtgcgcacttaagaacgcaaacagagccatttgcgttcttatgttcgcgcacttgtcgtttcgacgcgcacataggaacgcaaaccggccgtacctgctgctgttgcgttgctgtgccgtcacgtcgctgcgccgtcacgatgtcgctgccgtccggggaacgccgaaagacgcgaaacgggcctgcggcaaatcatgccacaggcccgtttctcaatgccggaccacgccggctaaatccgtgatccgcgaaaacccgcgaaaatcagcggtgggtggtgccctcgtaggtgtcgctccacgtcagcgacgccacgccgtcggcgatggaaatcggcatctgtacgatcggcgagttgccgaggtcatgctcctgccagcggtcgccgatgaacaggaagtgctcgctgttgtacgggtcgtcgtccagcggcaccacgatatcgacctgcgaatcgtaggtcttcgcaccctccggcgcgaacagcttccactcgctccacgggccgtgcaggtcggtggcggtggagtacttgttgtcgttggtgtcccagctggtcagttgcgagccgaaccagtagtacaggccgtccttcttgatgatggtcggcgattccaggccgtatgggtagtcggtggcacgctcgcaggcgacgtcctcgacgatggtgaggtagtcgtcggcgagacggtaaatgtgcgtgccatggtcgcggtcctcgctcatgatgtagccgctgccgtcctcatcctggaagacgccgatgtcacggctcaggtagccgcgccacgtgatggtggtctggaatgcgaacgggccggtcggggcgtcagccacggcgacgccgatgtgcgcgtatccgtagtcgggcgtttcggcatgaatatacatgacatatttgccagtggcggggcaatgcagcaccttcggccgctcgccgatacggtcggcggcgagggcggagccgtcttcttgcacatcaagtacgatgccgtggctgcgccatgcgatgaaatcggtggttgtataacagcacacgccttggaataaattgccgtttaccttgttctcgccatatgcataccaggtgtcgccgaatttctgcagaccgatgccgtgcagctgggcaacgtcgcccgaggtgtcgtgaggcagaaaagctccgaatctatcagccatgatttcccctttcgtgatgatctgctgttgattatctgtcgtgtccgcaactgcttgtgaccggttacagactgaaccattgtatcgtgaaaaccttgccggcatacggaagaatcggagtgcgcccggcggtggcgctccggcaacggccgcgtgggggcgtgcgttgcaatatgaggctctcagaactcgcagatacaagggactattcgttattttcgccctgtatctgcgagttttgagagcgtggttcttcctagatcacgccgattggcgttccgcgatggtcgtcggcagcagctgcacgtaatgcggctccacgatgtcgccttgcagcatggacagcaacagccgcgacatcgtctcgccgtgcagctgcgaatcctgccgcacggtggtcagcttcgggttcgccagcagggcgattggcgaatcgtcgaatcccgtgaccgcgatgtcgtccggcacccgatacccgaaccggttcaactggttgatgacgcccagcgcgatgctgtcgttggcgcacacgaatccgtccagctcgtcaagcatgggttggaactcgaccacggccatttcgccgctggtgctctcccagtcgtccgcgtagtagacgtggcgctcgttgaaccggtcacccatcgccgccttgaagccgtcgaagcggttgttcgacgatggtgagtatccggggccgcacacgtacaccagcttggtcctcccctggtcgagcaggtagcgcgtgatgtcgcgctgcccctcggtgttggtgaagtccacggccgggaacggcaggttctcgcgttcgctgacttccgagaggaccaccggccgcttgaccgatgcgaacgtgttggtgagcatgctgtcctcgctcagtgagaacagcaggtacccgtccgaaaagtcgctttgcaccagctgcgcgatgcggcgcgtggagtcctcgctgttggcgatcagcgtgaccatctggtagcccgcgtcgccgaggacctggttggcgccggccatcgcccttgacatactggcctgcgcgatggtctcgttcgattcgacctggatgatcagcgcgacggtgagtgtgcggcgttgcgcgagtgagcgtgcggcgttgttcggcgtgtactgtgatttggtgatggctgctgcgatgcgttcggctgcgtcctgcgagacgtgggtgttgccgttcagataccgggagaccgttccgtacgatactcccgcgagacgggcgacgtcgcggatggtcggttttttctgtgcatcgtccatggaatccatggcatcggtgtttgcttcgtgttgctggatattcgccggttgcttatcgctgttctggtctaccggtgtttcgttggaacgtgcagacgacttcgtccgagtgcggttcgccagacgccgggtcggtttgccgctcgttgatgctaccttgttcggcgcgtgaatagttgttgacatcattgttcctttacgcgtgcggccgtcgtcggacgaccgcgtacaggttcgagtatacgcagatgatgtaaacggtcacaaggggtgtctgtcgttgtgccggccgtggcatgcggagcctttcctcagtcgcggtccgccgcccgaccgccgtgtggctcgccatccgtggctcgcctgtgtcgacgcattccgacatggctgcgcaatctgttgtatttcgcgttcgcgttcagataatgcggggcatagtcgtcctgtcggttcccgcgacgcgagtacattgaaatcatgaccgatccgctgcatatccaactcaccgcgcgccccaccgtggacgactggcagcccgactgcgtaatggacggctaccagcaggcgacgatccatctcggccatgatgacgaaggcgatatcgtcgccacattcgtgcgccgggacccctcgaagctgcccatgagagcgcgatggaggcgtcagcggttcgcgctgcgcgggcaccggctcgcggtgatgtacgtgcacgggtggaacgactatttctaccgccgtcacgaatccgagttctgggaatcgcttggcattcccttctacgccgtcgacctgcgcaagttcgggcggtcgttgcgggatggacagacccctggatatatcgaggatctgcacgattatgcggcggaattcaacgccctacgcgacctggtcgtcgccgagcagggcgagcaggtgcgcatcctgctggtcgcccattcgcagggcgggctgagctcggtgttgtggctgaattcgcagcggccgcatcacgtcgaggcggtcgcgctggactcgccttggctggaattgcaaggcaaccgcatgttccgcatactgtcgacgcccgtggttcaggcgttccagctgggcggcggcaaaacggtgatgccgatgcgcgatccggggttctacggccgctgcatcgattgcgagaccggcggcgactgggattatctgcgccatccgctggtggacccgcagcgtttctttccccgcgccgggtggatgcgggcgatctacaatgcgcaggccgaggtgtcgcgccggctcgacatccgcattcccgtgctggtgtgcacgtccgaccggaccatgctgcagcccacatgggatgaggcgatgcgcgaggcggattccgtgctggacatcacggcgattcgccaggcggcgctcaacctcggcgatgtggtgacgctggcgacgattcgcggcggcctgcatgatctgagcctgtcgcggccggccgcgcggcgtaggtatttcaggatcgtggccgactgggcctctctgatggcgtggcggagggtgattccgcctgcgcatctgcgcaccgcgttggacgcagtcgcggcggccggcagtcatgtcggtggcgtgaatcccgatgtcggccccgacgcaaaatcctgaggtcccgcaacggctcgcggccggcgtccagctgcgagcctgcgcaggtcacgccgactgccgcaccaccagctcggtcggcaacatcaccgtacgcggcgagtcgatgccgtgaatctttttgatgacgatgtcggccatcaccttgccgcgcatctccatgtgctgatcgacagtggtgatctgcgggttcgactccctcagcatccgcgcgccgtggctggcggtaaaaagacatttctgccattggatttccttatggcggtttgggttagatgacgggcaaccccttgctacaatgagagggcttataaatccgtttgttttaagcaaaccccgagcttacttccaccgtaatcgccacgctcggcggcttcgccccaacggtcaaactcggcatcactaatcacaacacacttcctactttcatttcacaacgccgataatatcggctgaacattaatatttcgtggactagccacgccataaagacgcgcctagccggtaagcctgttgatctggcgaagccgttcgctgcggccggcaaggtcacggtgacggtggcgctcaagggcacggacttcgcgaagtccttcgaggtgactgtcaagtccgccgacaagacagctctgaacgaggtgatcgcggaggccggcaagctcgccgagccggattacaagtccggctcggacgagttcgaggccgccctcgacgctgcgaagaaggtcgccgccgacgaaggcgcgactcccgcccaggtggctgacgcgcttgccgcgccgcaggccgcccggaaggctctggtgaaggtttatggcgagaagcccgacccgcaggagccatccaccaagcccgagccgcagaagccggcggtcaagccgagcccgaacggcaaggtggatgccaccgagccgagcggcctgagcaagacgggtgcctcgacgatggcgttcgccgtggccgcggtcctgctgctggccgccggtgccggcgtggtgctgctgcgccgccgcgccgagtaaggcgcgagccgccatcccggccgtatttttcgttgttgcgggaatcgcgctctcaaaactcgcagatacgggccgtttttgttggatttagccttgtatctgcgagttttgagagcgcggggttggtggcagcccgtgcctcatcccgtaaaggtcccgtttctggcctgcgggatgtgactttcgccggatggaggcaatcgacatgatggcgacccggtgatcgtgcgccgcccccgttggcgcggagctgtcgcgaagcgactggggtggccaaacctgctgcatgacacgaaagacccgccgaaaccaatgcgaatactggtttcggcgggccttcgcgctatccgcgaatgcgcgccaaacgttacgcgtctacgcgatcacaggatgccctgcgcgaccatggcgttggcgaccttgacgaagccggcggcgttggcgccgagcatcaggtcaccctcgtggccgtactccttggcggcggccagggagtcggcgacgatggtctccatgatgttcttgagcttggcgtcgacctcttcgaaggaccacgacagacggtagctgttctggctcatctccaggccggaaacggcgacgccaccggcgttcgccgccttggctgggccgtacagcagaccgttcttctggtagacctcgatggcctccggggtggacggcatgttcgcgccttcgacgacgaccttgcagccgttcttcaccagagcttcggcggactcgccgttgacttcgttctgggtggcgcacggcaacgcgatgtcacacggcacggtccacacgccggagcaaccctcgtgatactcggcggacggcacgcgctcggcgtactccttgatgcggccgcgctcgacttccttgatctgtttgaccacggccacgtcgatgccgttcggatcgtagacatagccgttggagtcggagacggtgacgaccttggcgcccagctcctcggccttctgcacggcgtagatcgccacgttgccggagccggagaccacgacggtcttgccctcgaaggagtcgttcttcagcacgcgcagggcttcctgggtgtagtagcacacgccgtagccggtggcctcggtgcgggcgagcgagccgccgaactccagacccttgccggtcaggacgccggagtactcgtcgcggatgcgcttgtactggccgaacaggtagccgatctcgcggccacccacgttgatgtcgccggcgggaacgtcggtgaactggccgatgtggcggcacagctcggtcatgaacgcctggcagaaacgcatcacttcagcgtcggaacggcccttcgggttgaagtcggagccgcccttgccgccgcccatgggcagcgtggtcagagagttcttgaggatctgctcgaagccgaggaacttgatgacactctcgttgacggtcgggtggaagcgcaggccgcccttgtacggtccgatggcggagttgaactgcacgcggtaaccacggttcacctgcaccttgccctcatcatcggtccaggccacgcggaacttcaccacgcgctccggctcgacgatgcgctccagcacgcctgccttctcgtactccgggtgcttctcgactaccggctggatggtctcgaacacctcgcgtacagcctgaaggaactccggctggtcgccgtcgcgctgttcgacctgagcgtagacgcgcttcacatactcgtcagtgagcataattctccccttaatggttgggttatcaataagacggttttattgtaggtgcggtgtcaaggggcgacaagaaattgctcaggatgtggcgcggatgtgcgcgtcagctgagctgcagcgtttcggcgacttcgtcgacgatgcggtgcatggcctggcgcgcgttgtccggactgttctgccagatcgcttgggcgacggcgtcgtgtgcgtcgagggcttccggcttgggcttttgcgggtacatgtgcagttcgacgcgtccggagagcacggtggcgatgatggtggatagggaagcgaacatttcgttgccgctgttgcgcaagatcagcgagtggaattcgatgtcgagcttgtggaattcgtcgagcctgccgttctcgccggtgtgccggagctccgctgcgagcagggggagccgcgatttcacgtcgatcggcgcgtatcgggcggccgagatcgctgcggccggctcgatggcgaggcgcagttcggtgagggcgcgcagctgctccttacggtgtgtggagtgcagcttccaatggatgacctgggtgctgagcgcgtcccactcctcgaccggttgggagacgagcccgatgcgtcgacggacggtgacgactttggctgtttcgaggcttttcgcgacttcgcgtgccacggttcgcgagacgtcgaaccggcgctggaactcggcgtccccacgacggccaccgcggcggcgctttactcccggcaggcttcgcgcggcggcgccgacgacatcctgcgtgtggtctccacgatgcgcgcccaattcggcggccacgtgacccgtgcctgaagcggggcggccgcggaatgccacgagaatgatgcgatagtctgggaggtgacgatgcgcgggttgcaatccgcgcatccgggcgcagacacgagcctgcgcctgcgaatcctctcaccataggaggcgtcatgattgatggtttcaagaagttcatttcccgcggcaatatgattgacatggcggtcggcgtcgtcatgggcggtgcggtcaccgccgtcgtcaatgcgatcgtcaaccatctcatcaatccgctgatcgccatgatcttcggcaagccgaacatggacggtctgcttgcgttcacgttcaacggggcgaccgtgtcggtcggtgcgattctgggcgcattgctcaatttcctcatcatcgccgtcgccgtctacttcttcatcctggtgccgatcaacaagttccgtgacatgtccgatgcgctgctggcgaaggcgaagctcaaggaaagtgaggccgaggacgccgacgaagtcaaggaacccgagcccaccgccgagcagcagacaatcgcgctgctcaccgaaatccgcgaccaactggccaaagcctaactagaactcgcaccaccgctggcggggctatcggcgagccgactgggcgccggcaatcgcatgctcctagtcggcgaactcgctgttttccggggataatgcgtcacgctgcgcgggtatcgtcaccgtgtgcgggggcgcacagcgtgacggcattccgggaccattgcaatcactggattcttgaagaatgcgtcaccgtgtgcgggcgcgcacggtgacggtacccgcacagcgtgacgctctgatgtcgcgaatcgcacctgattccgttctcataggcggcgcgcacttagggacgcaacaacgggttatgcgccccgcggccagaggtggccgaccatgcgaccttcgaccgcggggcacgcgctccgtcagctccgcttacgacggaatgtggcgataagaccgcctccgatggcgagcattgcggtacaggtcagcgcgaccaggacgctggcaccagtatgcgacaactttgttttgccgttgtctgcctgttgcccatttgtcttgccatccggcttctggtgggctgcttgatccgtctcctcgtctggtgccggactgggggcaggttccggcgtgggctcggggcccggcgagggatcaggctcaggctccggagtctccccaccttccttcgcctgcacgacgaccgtaaaggtcttggaggtagtggctccctgactgtcggtgacggtgatagtgacgtgataggttcccggagtatcgggatccacatcatcggcggtcacattcgccgcagcgagcggcatgtcgccatcctccgcgtcgtgcgcggtcacgccgtcaagcggatcaaaagcgtcaccgaccgtaatggtccggtcactggcggtgatgacgggtgccgcgttgatcgttccggcagcacgcggccgaatcttcagcgtcgtcaacgaatgcggcgtgacggtgaccgtcggcgtcgccgcatcgaacgtgacgctgctgtcaacgggagtcacattatcttggttttccaacgtgttctctgcgttgattgctgcgtccatggtctgcacatccgcgactcggccagacagatcctgcccgaaattcaacttcagcgtgcggccgagcgcgcgatccagattgacgatgatcacgcgcagattgccatcatcatccttggaaaccaaagccgacagagctgttgcgccattgcccaacgtgggcgtcgaaccgagcgtcgaagtcagcacgctgtcgccgatgccattgccgagcatctgcagggcatacgcgctcggcgtcaggaagaacccaaaccgcccctcgcccgtcaccgtgcttgcgccgtcttccggcacggcctgaataaccgcctgctgggtcgggccgagcgagtcggcgccgctgctgtaccagtcgatcaggcagtgcttctgaatataggggctgccaagccgaacatattccagcgcgaccttggcgatgtacagcgcgtgcgattgcgaccggaccagcgcgctggtatcgcggaaaatgccgtattcgctgatgaccggcaccttgcctgccggcatgagtctcacatactccttgacgcggttgacgcccgccgtctcggccttcttcatcgcgtcgtcgtaccatgcgcccgcggtggctcccgtgggggtgccggaataagggtggatggtcatgccgtcgtaccactggttcgcgttcaggttcgtcatgcgggtgatgaaccctgtggactcgtagctggtgtacacgttcgccgtgtgccgtgtgccgtccgtgcgctgttcggccgtgttgatctggtcggtggtgttcttgatggcctttgatatcttgacgaacccgtcgcggtcaacggtgtagctgacataaacctgctgtcctttggccggaatcgcaccatgcacgccgtctccgaacctcagcgcgcccgtgctgtaatcgacctgcacgactttgtcgccggcaccggcggtctccaagtcgtccacgatgcgccactgttcgttcgactggtcgttgccgacccatacgctgacgctgcccttgttgacggccacgaacgacgggtcgtcgacgatcgcgccatcgtcgccgttcattttcgggttgacgttggcgtagcgcatgtaacgggtcagaccggccttgccgtcgctgaccgacgctgccttgttccaatcctccaggctcacggcgtactgcttggtgaagctcgctgtgccgccctccgtgtacgcctgctcgctgccgccgctcaccgcggtggtccagtagccctgcgaggcggtgccgtcggagttggcccacgcctggttcatttcgttgccgatttcgaaatagcgcacgttgtacggctgcgggtgtccgttgtctgcgcgcaccttcgcccagtcgatgccgccgttgggattggtgccgacctgcgcgttcagatattcgatcagatccgccgcgtcctgtgcgttgccgcggccgaggctgtacacatagacgatttctgaatcgacctcgtccgcgaacgtcgcgatttcaccgatgccgaaattcggttcgatgccgccttggccggggttgttgtagaagccgtgcatctgcttgagccgttgggcgcgcggaccgatggtggtcttccagttgaacaggttggaaatcgtgcctccggggtagcgaatcgagccgaatccgacctgcttgtacagtgcggtgaagtcgtctttcacgcgcatcgtatcggggtcgaaactgccgtacccgttgaaggcgtaccgatgattgacgccgaagatggaagcgctgtcgaccgtgcgctccacggtactggggtcggccgtgagcgtgatcggtacatgcgcctgatacgcggtgatggccgtctggagcgccgtgcccgcggcattcatcgccgtcatccgcgcggcggcgctgccggaggtgttgtccatggcgttgaccgcgttgcgttttgccgtggcgagtgcttgcgcctgcgccgacgcggcgtcgacctctcccgcggccagcagcgcgtcggcctgcgagaccagtgtgccgagttgttttctgacaagggccgtgccctgctcggcgtaaatcgcagctgcctggtcgtcggtgagcgtggcatcatatacgcggatgtcgtccacgtcgcccttcatcgaatgcgggtccatggtgccgatgttcttgtgcgagccgaccagcagcgcggtgacggcgttgacggccgaggttcccatgttcttttcgctgtcgagcgcgccgttgacatagaacttgaccttgcggctcgtctggtcgaaggaaacggcgatatgctgccatccgccgcgtgccaccgtattgttgctgagaacgtcggtcgcgttgacatacgtgtggtactggttggacgggcgcagcgtaagcagggagcggccggcgccatcctgctgcaacagcaccgcaggcttgtcgcctgtcgggtcgagcgtcgtatcgtaccggtaccacatcgcgaatgacgcgttgccggctccggtgttgacgtactggttgattttcatgtagctggacgcgcccgcgccgaagtgcagtacgttgccgaatacgccggcggggtcggcgatgatggagatgtcgtcgccgatgagttgggccgttgcgctgctggagccgccgttgttggccgcttcgcggtcgccggccgcggtgttctcgaagttccatgcgcctcgaaggtttgcggacgcggtggttgctggtgcggtggcgtcggcgtcggccgcataggctgcggctcccggcgacagcgccatcgctgctgtggcgatggccgccatgattgagcgccagggcttgccgctccgacggtgtgatgtgatatgcgtcattacatgctctctgcttctgtttcggggatcactgccatgtgatcgttggggtgagccttgcctctgtgtgaaggtctgctcaattctatcaatgcgattctgtgacgcaagtaatggcggggcgctgaaccggtgagagccggctctgtgccatccgcgtgccattagccctgacgattttggctgattcgagatggaaacgagcagaaaatgcaaatagaaaaaccctcagaatcagcttgattctaagggttctgagagtggagctagccgggttcgaaccggcgaccctctgcttgcattctcggaaaacccgtgggagagcaagatcatgcatgaatctttaaaaggttgaaatctagccgtttttagaagatttgcagcttatccgagaacgcattgaaatgcatggaatcccatagtcatgtctaccgaatgtctaccaatataaagcaccgccccgagctattggggcggtgtcctgtctggctgcgctagccgtgttgcaacgcgggggtacgtccttgcggacgaagttgcgtattcaccaagctgaggtaacggcggacgcgtgctatcgaatagtcgtgctcggcggctaagtctttgatcgatctgccggactcgtattcatcccgcagcagtttccctacggccagctcgctttccctagtcagccgttcgtggttctccagcgggggcatgttctcgatctcccctcccgtgtagcccttgtacaccttgccttgcggagtaacggattcgtctgcctcgttgccccaagctgaccaatgtggctggggatagcgggcaaacatttccaagtaggggccgggcgaacagctcgttatgaggtcgtactgctcatccggctttcgcgagtgttcgcgtttgcgtgtctcgatcatgttcacctggcgccgacctgcgtcaagggtgcgcatatgccccttcacgccgaaaagcagaagctctgtgacgttgcggaagtagaaaccgacccctcgaccgtctggcccgccatccttgcgacgcttggcccagacgatgttcgacacgtagcggaacccccatgcctgcatgacctcgatgccttcgggcagcaaggcattgggcacccagagatacaggtgggcgtctttcgccgttatgtcgtcaactggcaaggctttgatctcatccagagacatagtcccatagcgtcccagacgcttatgctcgggagctacctttcccgttcgattctggaaacgccatggcggatcggccagaatcgtcttgaagccacccgccgtggtggggagtggtgcgtacagtttttcagtcaccccaacagaataacacaaatagatctttaaatagatctttttggtgccgtgtcgtagttctatactgtgttcatggcgttcacgacacactcctacgacgatcccgacgtgctggcaagcggcatccgttcccgctacgagttccatgaggtacgaagcgcctgcgctgtgatgaaggcagtgtcgcccgaagagtgggcagatatcaccgatgtgctgggcagtttcagcttctccgcgaacttgctgctcagggcaggcggcaacaactccgagatggcggagacactgaaccgcgcgctgcgggagcgggggtggaaagaatgcgcctacgaacttgagacgaagggcaagatcacattcagggaatcgggtgtgccggacgaagacctgggcaccatgagcgaggcttcctattgggtggacaatcggaagggtcgtgtgcttgtcgatatcgaatggaatgcaaaggacggcaaccttgatcgtgatcttgcagcctatcgcgcatggcatgaggccgggctgattgatgctgcgatgatcatcaccaagcaccgcgaagacttgctcgacaaagccatcgagctgtgggcgcctcatctgggtgcgaccattgaggaggtgtacaaggcgacgcgtaaagcacggaagacgcgcaccgaggaagacaaaaggctggcattgccactcgacttgacgaccacgaccgtcacaagcctgaccaaggcggttgatcgaatcaaccgaggcgaggccggtacgtgcccggttgtggcggtcggtatctctggggcaacatgggacggtaccccataccaagaggtataagggcaatcactcttcggtgatttgcttggcggctttgaataagtcatcttgagtgttgacggtgatttctttctttacgagcagccccatctccggatgctcggtgccgagttctcccgcctgaagttctccacccttcaacatgcgctgatttgtgctgattcgtcgcagcaacgcgttgcgcttttcccccgtgcgctcggggtactgttcacttaggggttcattgctgatgatccagaccgttgtgaaacatgccacgtggttgttgtaccgtgctggaagcatgacggggtaacgatccaagaagaccaagagctggtcccagctgaactggctatcgaactcatcgagtaccaaaaccgattgcccttcgtactcatcccacggatgccgataatcggtcacacggtagatgctctcgatggggttgttgtcatatatgtacttcgtcttccccacgcccggatcaccccacaaataatgtacagtgatgtcgcgaagctgacggccatatttcacccggtcgcgcgctgtcgcaagttcggaaaggtatcgggtatagcgagccgccttacatgcgtcgtcgttcagcaacacctccgagacggtggcgccgtccatgatctgctgacgtagctcggcgagatcagaacgactgccctgccgatccttcaggtcgatttcccctccccgccagggaccgtctacacgtgtttcctccttggaacagtaatcgacgcaatcctgtaccgtgcccttgcgcatttcgatatgtgcgtcgttgaagcctgccttcttgaacttgttcttcagcgtctccatgcgaacgggagtctgaagctgtaagaatgcctgaaaatgagggtagtcggtcttgcctccctcctcctgctggaagatgtatgtccccagaacatccagcagttcctctacgtcttgctgcgtatgtttttcagcagagatcgtcaacatccaatcgcgtgcagttgatggcataccatcccttccattctgctcaaaagttggcgggggtaacactgcccccgccaagccgccgcaagcggcggcacgaccgccgaatgcttcgctgaagctacgcttcggcggtcgcggaaagcccctgtagggtctcgtcgtcaacccagtccgcgcgaaacagctgggcgctcttcgtggcagagttccacaaccagcctgttcccggcgaagcggcggagatagcccagggggcggcgccaacgcggagcgcggccgagggaagcaccatctttgcctccgcctcgcccatgcgcatagcgatcatctggccgttgaagtcatcgcgaatcggaatcgcatccttgcgtgggttttgactgaatccccagagcaggttcccagtcgctcgtcccatgccaagaatggctgtgaggtcgtgctgaaactgcctggaaactttcgcgtcttgcctgaacagttcagcgagttcatcgatcacgaggatgtttctaggattattcggcgtcggcgtgtgtgctcgggcgttcccggccatgtcctgcgcacgttggttcatggcattacggaacgacgttacaagctcggcagcggattccacgtcgactgcgaccgtctggaacattgcacggctcatgcttagctccattgccttcaggtcaatgccgtacaggcgaactagtccagcttgtgcaaatggttcaacttgaacaagaagattcgcaaggacggaaccttttccggaatcactctcgccgatgacaagtagatggcgttcgcaccagtcgatgtatacggggtggccgctggtatcgatggcaaggtagatgtcctccaaggtggaggcggggcggcgaccgagccaccgccccgcgaatcgcagccccatgactacatccttttggtgcgctgcacccacttgaagcgacggtgtgcaatcggctcagccgtctcgtccggccacaactcgttgacagtcagtgcgccgcgcccggctgcctcctcttggttgcaccattcgcgcggccatgcgatgtagtgaccgccaagtcgcttgccgtagcgaacaagcttccgatcttcatcctcgacctgctgggtgttctttgtgcgtgcggcgatgatgtttttcgtcgcgcagatgtcccttgcgatcttggcgacgatggcacacgccaccagtgcagcaatgagagcgagccaaccccaccaagggatgctgatgccggtctcattcattggagtgccttcctgcgttggtgccagcggccgcagactccacgccgtcggcgacgatggtgaatcccaggtcgtccacggcgtagggggagagcagcacgcggccagtgagtcggagctgggtcatctccgggatcgcggcggagggacgctgccggacgaagacactcaccttgtcgcggatgcgcttgcggcggcaatctcggacagccacgccggggagtttgtagacgagaccaccgaagcgctcgtcgtcaacgcggtgctgcttgttgctgtcctcgtccttgacgttcctcgtttttggggccatgtcgtccacttcaatctcgtcgagcgcgacgaccgaaaccccatcgggaatcaggtcaaacaccgcgccgcggagttccttcatttcgtcggccattgtgagtacctccttaaggttggccgttactggatcacttcatgaacattgcgcgcgacgaagtccaccaagtcgctctctcgatacaggactttcctgccgagcgtcacatacggcaggtgggagttctcgaacctccagcgagccagcgtcttcaccggcacatgcagtatggtcgccgcatctgccggggtgaggagcgttggcatctcggagtgtgtcgcgtttgtgttcatggttttagcctgccggaatcaacgtaggtatcggtaggggaatgaacataatccgtagttttgcggtatcatgcatatatgagcttgacaaacgatcgagagaagtatataggcgcctgtgttcgacgggcgcggcatcgatgggcgcctattgacagagatggcaaaattagggggtctcgcgaggacttggcgaagagagtcaaggaacttgtgccgaatagtcttgtcacagccgatgtgcttgaaaacattgagactggccgtacgcgactaaaactgtctgatgcgttagatatagcgattgccttgggggtgcctctcgtgaacttgtttgtggatgttcaaaagccttttgagaacaatcctttgttcccggatgggaaaactaatttgcagatctatgatgaacaacgtctagatgatttcgaattgcaggcagaagatacagattttaaaaaagcgggaaggctattggctgatactaacaagctccagtggatgctaaaggcctatccggttcatggtttagttgatatttcagcagtagctgaacataaatatcggatggcattgagggaatggaataatagccagttctggatttatacagataaaggacgttttagaatgggtgggtattctaaaacaccacaaccgaaacgtggagaatattcagcaacaaaacaggaacaggttgaactatctctaaaagtattcaaggtgcttgtgaacacggttaatgatattgcaaagaatttgaattggttaggcagatatgcgtattgcattccagatgaaatggctgaccgaatactcgatgctgtagctgaggcagggcgttgtgttcagtcgtttgacgtagatgccatctcggtttctcagcctaaatactgggatgtctcctttgaagaactcgttgcacgtgtgaggaaaagcaatgtcgaaagcttggattgaagacctctggctgaccgagccacgggagacgttgcccgatggcagcaaggtgaagattccagttcccagttctgtaacgaagagcttggccgcgtatatgaagacgccggagaaggccaaggtgcccgggaagtttaagacggcgcggtacggacacgggaagcgatggcgggtgtcttggtgggcaaccttgcccgacggttctaagaagcgcagtagcaaggcattcagcacccgagccgatgccgagtcgttcgcggcagccatggaggatgatattcgctcaggtcggtatgttgatccggccgatgccgacaggccattccaagcggtcgccttggaatggctcgcatccaagaacaacctgcgcggtcgtagctatcttcgatatgagaacgacatgacccggtacgtgcttcctaagtggggggatcgcccgatcggtagtatccaagaatcggaagtcagcgaatgggtacatgagcttcaatcaggaacagccccgcacgagttcaagcgtaagacgaccatgcagccgatgaagcggcggacaatcaaaggcgtagtgaaagatgccttcggcggtgtgatggcctatgcgtcttcgcctaaacggcgatggatactgtctaaccccgctgccgatgtcgaacttccccaagatgccgaaaccgacgatcgggtgttcctctctcatcagcaggtggcggatatcgctgaggccgcagcgcgagttgacgtcaaaaacccgatggtctccaagctgctcatcctcttcctcgcatatacaggcctgcgggccaacgaagccttggctcttcgcatcggcgaccttgacttcacaaggatgcgcatatcggtaacgaagacgatcactgctgacaggcaggggcgcgaaatcgaaggcaaaccaaagagcgggcgcaaccgtatcgtgcccatcccaggtttcctgactgccgatctcgaacaggtctgtgacggtcgcaccgatgacgactatctattcactgcgctccacggtgggatgatccacttgaacacatggcggacacgcgtatggtacccagccaaagaaggggcgggctatggcgacgtgaaggggctgagaatccatagcttaagacacacgtatgcctcgttcgccatcggcgcaggttgcgacgtgaaaacgcttcagagcatcatgggacacgcctcggctaccgagacgctgaacacctatgccgagctgtggcctgatcgtattgacgaggtggcggccgtcatggaggccaagtaccagcagtgggaagctcagcggcgagagtagtagtaggtgctaacggcctgtcaggtactttagtcatgtctaccagtgtctactgtttggtgctgaggcaaaaagagatattcccttgaaatcgttgagattccaagggaatgaaggtggagctagccgggttcgaaccggcgaccctctgcttgcaaagcagatgcgctaccagctgcgctatagccccatgattccgccgttgcggcgttgtcagtgagaaaaaaagagcggctgaagtagccgctgcaattttcctgtgggcccgggaggacttgaacctccgacctcatccttatcagggatgcgctctaaccacctgagctacgggcccgatccatacgcttcaaaagcgcacgatgaactagactaccagaattgccgtatgtgtcaaatccagtcggtttttgtggctttcggcgtgtcgttctcgtcgttgtgtgtcttcacatggcttcctgcgccgacaatcgcgggtgcgccgataagggacatgggttactgtaggtgatggctatggtgatgtctggcgcatcggcggccagaccgacttccttcgacgaaagggtgtacagtgcagtatcgatactgttgtggcgatgaagacatgtcattcgatctcattccggaaccgcaatccgtgacattgaacggggatgccgccgattcggatgatgccggagctccggtacccgtcgcgttgccgctcgtaggccgcatctcggaagatcgcgacatcgatgacatcgccggcgttttcccgacccagcttgccgatgatatcgaagcggcgacgggcctgcgctgggacatcgccagcgatgtcatggtggccggactgcccgcgccaaatgccgcgactgcgcacccggttccgccatacacttcatgctggaagtcgttcatcacactgagactcgacccctcatccctggagccgcaggaataccgcctgaccatcgcaagctccggcatagacgtcgtcggcggcgatacggaaggcgtgcgcaacggcgtgcagacccttcgccagatcatccgtcagtgcgcgccggcgctgcctcgactcgtcatcgcggacaagccggcgtacaaggtccgcggctactatctcgacgccacgcgcggccgcgtccccacgctcgactggctgaaaacatgggccgaccggctgtgcctgtacaagtacaaccagcttcagctatacatcgagcacacgttcatgttcgacgatctgagcgagacttggcgcggcaccagcccgctcaagcccgccgacatcatcgcgttcgacgaatactgcgcgcggctcggcatcgagctggtgccgtcggtctcgactttcggacaccagtacatggcgatgcgcacgcgcgagctgcgccatctcggcgagtttcccgaggacgccgaccgtcagtacggtttcgtggagcggcagcgtcaccacacgctcaacatcaccgaaccggagtccctcgcgttctcgttcaagctgatcgatgcttacatgcagctgttccgcacacgcaagttcaacatctgcggcgatgagacgttcgacttgggtcgcggccgttccaagcccgaagccgaacgccgcggcgtggccacgatgtacgccgacttcgtatcgcagctgtgccgtcacttgtctgagcgtggccgcgagccgatgttctggggcgacatcgctgtggagatgccgcagattctcggcctgttgccggataacgtcacgctgctcaactggctgtacgcgccgggcatcggtgaagacaaggtacgcctcgtcgcgcaggccggggccccgcagtacgtgtgctcggcggtatggtgctggaatgcgctgctgccgcgcctcgacgactcgtggaacaacatctcccgactcgcgcgctacggcgtgaagtacggtgcggtcgggtacctggtgaccgactggggtgattacgggcatgtcaacgacccgcgcatggcggtttccggcatgatattcggcgcgcagtgcgcgtggaatccgatggctcatatccagggtgaggccgggtgcggcgacggcgaagaaggctctgctgccggttatgccgatgccgctgccgatgccgtccgcgagaacaaggccgccgcggacggggattccccggcgccgctcccgttgagctcggagagcgacgattacaccggtggcgcggccgacgcgattgcgggcgcgccggccggcggcgatgggtcgtgtgccgagatgtgccgtcgcgtggccgaggtcgaatatggcgaccgttcgggcggcatagtcgaggcactgcgagatgccgcctgtcgtgtggcgttcggctgggatgacatggtctggtactgcgagctggatgaaggcgacggacggatgaatcgcgatgccgcatcggcgatgcatctcggcgtgcatgggttcagcggggaatatgggcgggagtgggatgcccgactgctgggcagtaccgatcttgatgaggctcggcgcacgatgctgcaagggctgtcgccgcatatcgtccgcgcggccgaggcgaacgaggcgctgctgtgcgacgccatgcgactcggcgccgccgccggtcgcgcatcgcgtttgggtgcggctcggcgtgatgtgccggcgatgctggccgccatcgaggggcagcgctggttcaacttggtcggcttgtgccttgcgcggcggcatgacgtcatcacggtcgatgccggcgatatcgcccgcgcgtcggccggattgatcgaaccggacgcaggctcttccgcagggccggaagccgtgcagtatgtctcgattcgagtggcacgtggtctggagcgctggttcgagacctactgcgacttgtggcgttctgtcagcgcggaatcggaattggcccgcatcgcctccatcgtgtggcgctgtgccgacgccctgcgttcataagcccaagcgcacatcagaggcggggcgtcgcgcggtagtggcatgagccggtcgttgttgccgtgccggcgctcgctggctgagacggcgcgaacatgcgatccatgccgggtctcatatgtgagatccggcatttcgttgtgccgcaaggcgtcgccgcctcgtgcagtggcgtttttcaggccctgacaggcgagcttgccgggtatctgcgcttcaagggggtgattttcggtcgccggaacatctatctgcatttcaaggggttgcggcacagaggcatccgaggtatatgagccattcacttattggaatgacgcggttctagcagtgttcctacttggtcaccaaccccttgaaacgtagatagatgttcgggaagtcggaatcacccccctcgaaatgcagatagccgtgtaatccacgcctttcgcgcaatattcgtaccgctcagggcaccgacatcgagttttcagctctcgtcgtcgggcagcgccatgtcgctggagccgaatcgcggcccgctggtcgattcgcgctgcactagctgcggcggatacgcggtgtgcgccggaagccagtgtttgctgctggcactgacgctgatgagtcgcagcgcttcatgggcgatgagccggcacggcgggagaatcgacgagagcggcgggtcggcgatggccgccgcgggggagtcgcccgacccaatgaccttgacctcgtccggcacacggattcccagttggttcagcgccatcagcgctccgatcgccacatcgtcggtggcgcagatgagcgcgttcgggcggttgcccttgtccccgaacagtctcataacgtcgtgatacccgcgcttcgcggaattgtcgccgaacgtggtccaacccggttcggtcatcaggttcatgaccctcgttgacgtctgcaacgtggcgaacagctcggcggcgctggcggagttgacgttgccgctgaggaatgcgatggagttggcgttgtactctgcaaggtgcgaaagcatcagcttcatggaggcgctttcgtcgacgccaacccagttcacgtggaaggacgtggagtggccgaacgcctgaaccagcgaggtcatgccgacgtggtcatccaggaacgctgcggtgttggcgtcttgcggcggcatgaccaccagcccgtcgacccggcgggcgagcatggcttcgatgcgttccgtctgggttcgctggtcgtcgccgaggcccagcagcagctggcgtcccgagcggttgacttcgggctccaactccgcgagcagtcgggctgccagagggtcggtcgggccgggcatgatgaggccgatggtattggtcgtgtcgctgcgcagtgcgctggcggcggagttggcctgatagttgagctgttccgccgcgtcccgcacgcgtttcgcgatgttgtcgtctttggtgcggcgccctgaaagaacgcgggagacagtggctttggatacgcgcgccaatgcggcgacgtcggtgatggaactcgttgagctcatcgttcatcacctcggattgtctgcttcgattacttctgccgggcaccgcgtcgctgcccgttgtatataggatacatgaacgcacattgcgctcattggtcgccgcgatgccgtatgggcgtgattattgccaatgtttccagtggacagacgtaatggtttctgtataaatcataccatttcattacaaaattgagaaatcggtttccgggtttactaagcggattttagggtgtatagtgacggatgaaagaaacgatttgctcgcgatggtgtcagcaaatcaccaacccatccagcggtggatggctcagcacggaggagatgctatggtcgccgatattgacgggttcctgccggacagcgcgtttctgctcgacgttcccgccaccgattggaaagatgccatccggcttgccggcaaaggactggtggcggctggtttcaccaccgacgcgtatacggatcagatgatcgagacggtcgagaaaatgggcccgtacatcgtcatcgccccgggtctcgcgctcgcgcactcccgcccgtccgaggccgtgctgaagaccggcctgagctgggtgcgcctgtccacgccggtgaagttcggcaacaaggccaacgacccggtatcgctggtcatcggtctggccggtcatgacgagaacgagcacatcaccgtgatgtccgccatcgcctcggccctgatcaatcccaagaagaccgcggcgctcgccaaggcccccacgccggaagccatccgcgacatcctgcatcaatagcagggcggcgcaacccgggccgggccgccggtgagcggcacacccacacttccataactgaatccaataactgaaacccaatggctgcgcggcagtcattccaacgaaagaaacgagggaatcatgaacatcctctgcgtatgcggcaacggcatcggcacatcggtgctgttgaaggtcaatgtcgaatcggtcgcggccgaccttggcgtcgatgtcaatgtcaccacctccgatgcgggcagcgccaagggcaccgccaacatgaacgatctggtgctcacctccgccgagctcgcgcccgagctggaaggcaccaccacgcccgtcgaagtcatcacgaacttcatggacaccgacgagattaagtcggtgctggagaagtacgccgactgagccgctccccgttacggcctgcgtgagatgccggccagaaaccataacaagaaaagaaggaatccatgaacgttgtcgttcaagtgctgaatttcatcagccaggaaatactgaatgtgccggcgtatctgattggcatcatcgcggccatcggcctgatcgcactgaagcgcagcgccgggcaggtcgtgtcgggcgccctgaaggcggccatgggctacctgatcctgggtgccggcgctaccgtcgtcacctcggctctggccccgttcggcgacctggtgctcaagtccaccggcgcgcacggcgtcgtgcccaccaatgaggtcatcaccgcgcaggcgtccagccagtacggcgcctcctcggcgtacatcatcgtgctcagcttcatcgtgatgctgctgctcgcgcggttcaccccgctgaaatacatcttcctgaccggccaccacatggtgttcatgtccaccatgctggccgtggtgctgtccgtgggattcggcacggaccaccagctgctcatcgtgatcatcggcgccatcctcatgggcgtgatcatggtggtcatgccggcgttcgcgcagccgttcatgaacagggtgaccggtagcgacaagctgtcgatcggccacttcaacaccctcggctacattgtctccggtgctgtcggcgccagcgtgggcaagaaatcgaagtccactgaagacatcaactttccgaagggcctgagcttcctgcgtgactccatggtctccaccacgctgctcatggtcgtgctgtacctggtcttctccgtgtgggccgccatcgtgctgccggccaaggaagcgttcaagatcttctccaccaaccccgacaactacggttcgttcttcatggccgcgttcgcgcaggccctgcagttcggcatcggcgtgagcatcatcctctacggtgttcgtatcatcctcggtgaactcgtccccgccttccagggcattgcgaacaaggtcgtgcccggcgcccgcccggcgctggacatcccgatcgtgttcccgtacggcgccaatgcttcgctgatcggcttcctcggctccttcgtcggtggcctggtggctctggcgatcatcgccgtgtggctcggcccggtctggggcgtcgcgctgatcctgcccggcatggtgcctcacttcttcgatggtggtggtgctggtgtgttcggcaacgccacgggtggtcgtatcggtgccattgtcggctcgttcatcaacggcctgctgattaccttcctgccggccgcgctgatgaccgtgatgggaagcttcggtctggccaactccaccttcggtgacgccgacttctgctggttcggtacgattaccggcaacatggctcacctcggtcctgtcggtggcgccatctgcctgctgatctttgccgcggtgctcttcgtcgccgcgtggatctggcaggtcaaggtcgtcaacaccggctggactccgggtgccaagcacgccgagtacatcgagcaggtgaaggccgaggagaaggccgccaaggccgctgctcgcgccgccaagaaggccgctgcggacgcgtgatactgttccgccgccgctgagcgattatgcgggagcgtgagggtgcgagtgccctcgcgctcccgtttttgtgtgtgggaacgcgtgagatcgcgggtggtttcgcggagtgcgcagtattgtgctcccgctagcgggagctgttgagcgcagcgagactgagggtggttctgtgcagcggctggtcagaccacccccagtcgctgcgcacggccccccgccagcgggggcgttgtattccttgcctcatgctgactggggacagcgtctgcgacaatggctcgtatgccattgcccaatcagcgtcgtcatgcccgaaaagcacccgcgtccgcctcagccgccgccgcgtcgaccgtgcttgaggtggacggcctgcaattgcatgtgacgcgcaagcgcatcaagaacctctatctgcgtatcaagccgcctctgggaaccgtcgaagtgtcggcgccgatgtgcatgagccagcgtcagatcattggtttcgctcatgaacggcactcgtggatcgtgcaacagcagcggcgtatggccgaggcccgacggatgtcattgcggcaggccgagacgttgacgcccctccccagcgctcccgccggtgatggaggacatgccggtgtcgatggccgccggggcggcgatcagccgcagctccccatgttcgaccgttcggccatgtggaccgatgagcgcaaacatgccgccgcggccgcgatcgatgccgcgcttccggggctgttgcgcaagtgggcgcccatcgtcgggcgttcgccgagccatgtcaccttgcgggtcatgacgtcgcgctgggggtcatgcacgccgaaaaccgggcgtatccggctgaatcttcagcttggtctgatggagccgcgatttttggagtacgttctcgtccatgaaatgacccatctgtgggccaatggtcacggggctgattttcagcggcggatgagcgcttatctgccgagctggcgtgagctgcgccgtgaactcaacaagcgcgtactgctgtgaaacatatcgtgaaacatgctggccgacatgtcgcggcagcaaaacaaatgatggcggcggctcagcattgccactgaaccgtcgccatcattgatgtgcatcttttgcgtcagaccctgccggtgtgcatgggagcgggcattcacccgccatgcatgctgcctgctgtctgccgcgatctatcgcgtcacgccagatgcgaacgcatgaaccactggaacttctcaagctcctgcacgtggtcctgaatgatgttggagctgatcacgtccagctcgtccagctcggcgatggccttgcggtcatcggcgatgaacgcgtcgtaatactcgatcagggcctcaaggtacttctcggtgccggcgcgaccgtcgacgtcgaacggcttccaggtgcggttgcgggtgatggcatcggcgcggccgtcaggcgtgccgcccagcgtggcgatgcgttcggcggtctcatcggcctgcgcgagcactgcctcgacctcagggtcgagcatctcgtgcacggcgatgaagttcggcccggtcacgttccagtgagcgtgcttcaggaccagcgcggcctcctgctcctggctcagtcggttctgcagaatggcaatggccttctcggaggcggcttcgtccagtcccggcacaacgaatgcaagtgtcatattcgttcctttcttctgggatatcagtcaccctccagtttatcgatgaagcctgcgcgatgtgtcagccgccagcatagttatcgctcacagtgagcgacgtaacagcaacgtaggctgatgttcatcagcggtacaggtcgggtggaatcagtgtgccacacaatgcgatttcgggccgtttttacgctggtgtggcacggactgggctgagagatgggacatgcggtggtgcgactgggcaaggcatgtgcagcggggcaacacgaaacacggcagacggcgtgactggacgtagctgcacattcagcaggtacaatacggcaggtcaattcgcgtcagtcaacgcggtcagtcgccactcgccgtcatccgcgtcggtgccggcggacacactggagtaaacagccggaccccgcggcgaaaaggagcgtgcagatatggtcgattcgcgtcgcgatgtggctggccaggccggccggatccccagcccatccgtgcaggctaccatgattggtctgatggcgattctgctgtggagtctgatgaccgggctggttcgcgtggtcgccgatgcgttcggcgcgacgctgggatcggcgttgatatacacctgcggcgcggtgctgctgctggtttttcgccggccggcaccgttgcgcaagtatccgcgaacgtatctgatcgtcggtggcctgctgttcgtgttctatgagtcgtcgatttccttgtcgatcgggctggcgtcttcggcggcctcgtcggtggaggtcagtctggtgaactacctgtggcctacaatgatggtgttgctggcggcggcattcgtaccgagcggcgagaagcgttcggcgcggaacgaggggataggacgggaacccgcagcgcccagcgacgcgcaggctcaagatgactcggtccagtgcggcacaaactgcagcgcaggcaagccgccccgccattctcgtggccgcgcggtgctccgcgtattgcctggcgctgtcgtcgccaccgccggcgtgatactggcggtcggcggcaacagcggtttggactgggcgctcgccgcagggcatgtcgcggcgaatccactgccgtatctgctggcatttgcgggcgcgctcgcatggtcggtgtatgcggtgttcacgcccgcgctgtccaagggattcgacggtacgtccgtattcttcccctttgtggccgtggcgctgtggatcatccacttcgcttccggccaaggttggccgtctgccgcgccgtcagtttggggctacttggctgtggtggcggccgcggcggtcatcgctggcggatacgcctgctggggctatggaatcttgcacggcagcatgagcacgcttgcgatggcctcttacgccacgcccgtgctgtccacggcagccagcgcggtattgctggggttgtctttgacgttgccgttctggtgcggcgctctgctggtcgcagccggttcgatcatcaactggtggatttcctcgcagcgccgatgatcggcaatggccggcgacctcccgcccgcgccgcgctattcggcggaaaccggcgcgtggtcaggggcgccggccttgcgcacctcgatggtttcgatacggcggccgtcgaccttggtgacggtcatgtcgtacccgtcgtcggagtgcagcacatcgccctcggcacccatcttgccggtgtgtgcgaggaaatagccggcgacggtctcgtacgggccgtcctccagttcgatgccggtcagatcggcgaagtcctcgatggtcatgctcgcgtcgatggtggcgacgccgctcacgaatgcgggctgctccttgcgctcgccgcccggttcgctgggcaggtcgtattcgtcgcggatgtcgccgacgagctcttcggtcatgtcctccagcgtcacgatgccgtcggtgccgccgtactcgtcgatgaccacggccaagtggatgccgcgcttgcgcagcagttcgaggcttggcagcagcttggacgtgccgggcagcgaaatgccttctcgcgtcacgtcggccacggtcgtcgcgttggggtcgcgcacgtccagcaggtcgcgcacatgcacgaagccgatcacgtcatcgaaatccctgccggtcaccggatagcgggagtacggcatctcgcgcacgtacgccgccgcgtccttgatgctctgcgaaccgtcgaggaacacgacatcggcgcgcggacgcatgacctcggcgacgatggtctcggacgcgtcgaacacgtcgtcgaggatcgtgcgctcgtctttgctcagcgacgtgttcgtgttgacgagcacgcgcagctcctcgtcggagacctcgctttcggtctcgttcgggtcgaagccgagcaggcgcacgataccgttcgtattcttgccgatgagccagatgatcggcttgcagaccttggcgaacacgtcgatcgcgggcactacggcgcgggcgatctgttcggtgcgctgcatggcgatgcgcttcggcaccatttcggagatgactatcgagcagtacgagatgatcagcgtcagcacgatggtggtcagcggtgcggcgatgttcgccggcacgccccagcttttcacgacgggcacgatgaacggcgaaatcgacgattcgccgaacgatgcggacaggaagccggagagcgtcacgccgatctgcacggtggacaggaacttgttggggtcgcgtgcgattgccgccacacgtgcgccacgggcgtcctcctgttccatttgatcgatctgggatccgcgcagggagaccaaggccaattcggtgccggagaagatggatccgagcactaggaatatgaagatcagaaggatgtttaaaccaagtgacatggactctactgtaggggggtggcacgtcaattgtcgcagcgaatcattctcagtaagaaaggtgcgagcctgcccacgcccgaaacgaacatcaaaatcgacaaagtcccgagatgccgccctttatggttttgtgcgcttgtgcgcaaatgtgagaaatcctcgcacctttcttattgagaaccattcgctgcgacttgccggccggtcacttgcatccgcaggactgcctagtgacgagttcggcggcgatgagctgcacgtcgggcgtgtgcgcggggtcgagcgccgcgttgaccgcgcaacgggcgagctcggcatcggtctgcgcggaggagacgaacatcgcgttgacgttgcgctcgacgagttcgttgatgcggcggcgctcgccttgcgggtcgcctcgcgacaggttgatgatcagcgcccgttcgcgtttggatgcagcggcttcgagctggtcggtgaattcggcgaagtatgggttcgagaagtcgggcacgatgacgccgagcgtgtgcgtggtgccggtcttgagggctcgggcgacggagttggggtggtagtcgagccgctgcgccgcgtcgaacacccgctgcgcggtgtccggtgagattttcttgggactgccgttgagcacgtagctgacgacggcggtggagacgcctgcgggacgcgccatgtcgaaacgggtggcgcgttgccgttgcggatgcggcatctcgaatgcgtcacgctgtgcggggtgcgtcactgtgtgcgcccttgcagcgtgacgcatattgtataaccattgggaaataagggttttactgacgcgtcactgtgtgcggggccgcacagcgtgacgctacccgcacacagtgacgcgaaatgcggcgataagtcacgctcccgtcagaagctcagtacctcgaccttgccggtggacagctggtagcgggcgcctacgatcatcagtcgatcatgcgccagcgcgtcctgaatgattccgctgcgcgtgaccagctcttcgatggtacgcgccacatgtacgcgttcgaagtcctcgctcgtatccaactcggcctcccgcgcctgccacaccgacatgccgaccgagcgcagcacaatcgaatctgagctggcgatgcgctcatccaattcggccatcgcatcagcggactccaacgagctttccgggtcgctcgtgctgtcggcgatcagcgcgtcaagttgttcggcgcccagcgccaccgccccgcagccttcatgacccatgaccatgagcaggctgacgtgcagatgatccacggcatattccagcgatgccaataccgcgtcgtcgatgatctgcccggctgtgcggatcgtgaacaggtcaccgagccccgcgtcgaagatgatttccggcggaacgcgcgaatcggagcatgacaataccgccgcgtcggggttctgccggtcgatcagtgattcgcgggtctgcatgtcctgccacgggtgctcgctgtgcccttcggcgaatcgccggtttcccgccagcatgcggctaagcgtcgagttcgcggtggattcctgatccgggtcttcctctgccatgacatctccgttccgagtctcaggttcgcgtcgggtcggcgtgtatgtgcctgtatgtgtgagcatagcggaaacctgtttgataagtatgaaatatccaaggaacgttcatcacctctgctcatagcgaaaccgcggatcgggcgcggctgtttttaccggtttgtgagcgcaaactgtgatgattgtcatgaagaaaccctcgtgcgtccgtatcggcgaaagccgcttgacgttacgatggggagacgcaatgaccggattgcgtggaaaggaacgatgatgacactgcttcagcatgaactcaccgattttacggtgcaggcttttcagaacaacgaattccatgaggtgaccaaggcggacgtgctcggtcactggtcggtgttcttcttctacccggcggacttcacgttcgtgtgcccgaccgagctggaggatctcgctgccaagtacgaggacttcaagaagatcggctgcgagatctactcggtctcctgcgacacccacttcgtgcacaaggcttggcacgacgccaacgaaaagatcgcgaagatccagtacccgatgcttgccgaccccaccgcactgctcgcgaaggacctcgacacctacaacgaggccgacggcgtggccgagcgcggtgacttcatcgtgaacccggagggcaaggtcgtggcctacgaggtcatctcctccaacgtcggccgtaatgccgacgagctgctgcgccgcgtgcaggcctcgcagttcgtctacgagcacggcgaccaggtgtgcccggccaagtggacccccggcgaggagaccatcgagccgagcctcgacctcgtcggtctcctctgatttcccgcctcactgacgggctgagttgtcaagcaaacagcagagctgtttgtaggcgaaggcgagccgacaggcaagcacaacaggctgcggctggaggccgtccctgattgcaggggctggagggctgtcggtagcggtcagagttggctggggatcgccaactctctcgcccccgctggcgggtagcgatgtaaggcgagtggcctctccgcccccgctggtgggggctggcggcgacagccgactgggggtggtcgcggtgataggcgaactaccccacccgcttcgcgggagccccgccggcaggggcatatgcatatgtaaggagttccatatcatgacccagatcaaccgaagcgatctgtatgacgttgttgtcatcggtggcggccctgcgggactcaccgccggcctgtatctcgctcgcgcccgctaccgcgtgctgattctcgaaaaggatgatttcggcgggcagatcaccatcaccgacgaagtcgtcaactacccgggcgtcggccgtacgtccggtcgtgcgctcacacagaccatgcgcaaccaggccaaggatttcggcgcggaattcctctcagccgaggctaccggccttgacgtgaacggtgacatcaagaccgtgcacacgtcgcgtggcgacctgaagacgttcggcatcctgattgccaccggtgcaagcccgcgcaagcttggtttcgccggcgaggccgagtacgctggccgcggcgtggcctactgcgccacatgcgacggcgaattcttcaccggcagggaggtgctggtcgtcggcggcggtttcgccgcggcagaggaatccgtgttcctgaccaaatacgcctccaaagtcacggtgctcgtccgcgaaccggacttcacctgcgacgcggcggtggctgccgaagccaagaacaacccgaaaatcgacgtgcgctacaacgtcgagctcaaaggcgtcaccgccggccagggcgggctgcgcgaggcgacgatcctcgaccgccgaactggtgagacggaatcgtggaagccatccgacgacggcacgtttggtgtcttcgtgttcgccggatacgtgccggccaccgagctcgtgcgcggtgtcgtcgaactggacgaccacggctacgtggtcacgcgcggatacctcgagacctcggtgccgggcgtgtacgcggccggtgacctgcgcgtcaagaacctgcgtcaggtcgtcaccgccaccgccgacggtgccatcgccgcagtggaactggagcggtacgccaagcagatgagcgagaaaaccggtcttgtgccgcctcgcccgaccgcatccgcatatgagcaggccgaagcgcagaccgcggctgccgccaatagtgctgccgctgccggcaccacgcccgccccggctcctgccaagcgcagcgccgataccgccgccgcgacggccgccgccaaaaagcccggcgagctcttctccgccgccatcaagcagcagctcggcgtggtctttggccgtatgacccgcccggtcacgctcgtcctcgaactggacgatacgccattgtcgacggagttgcagggattcatcggcgagatggtggcgctgtcgaacggcaaactgaattcggtcgcggtcgatgcggcgggcgtgatcaccgctgaggacggttccagcgcgccaacgtcgttgacggtcggcgagccgttggccgtcaccttgccggatggcgccgaactgccggtatatggttcgctggatgattccggtcgcgcgcagttcgacgtagcaggggtgctgccgtctgcgcggccggtcgtgctcatgtgcgtgccggccgagaattccgaagccggtacgttgctgttcaccggcttggccttccacggtgtaccgtccggtcacgagttcaattcgttcgtgctcggcctgtacaacgccgcgggtccgggccagcctctggacgatgacctcaaggctcgcgccgaggccattgacacgccgatcgacgtgatgatcctcgtctcgctcacctgcacgatgtgtccggaaaccgtactggccgcgcagcgcatcgcgtcgctgaacccgaacgtgcgtgccgaagcctacgacgtcgcgcacttccccgagctcaaggaccagtatggcgcgatgagcgtcccctgcatcgtcatcaaccagcccggcggcgagcagaaggtcgaattcggcaagaagagtgtcccgcagatgttgacattgctcggcgcatagcgggcgctgtgcccggcgctgtcctttcatcccctttcaataattctaacatgttagaattctccgttaacatgttagaacttcgttgaccgtggccggcggacatggtgctttcgacgcgccacacggcatcaataagggggcccgctaggcgcaggccccccggatcagtcaactatgagagtctattgtcgcggatgtgggcagttacctcgttcttggacgaatactgtccggggcgattcaggaaagtgatttactttcagtatctgaagccctccgccttgcgttacggttcaggccccgatggatctcttgccctcgccgttcctgccgccgagatacttgaccaggctgatgctgatcagagccagggcgaacaggccggtgagcaccggaatcagcgcggcgtagcgatgagcctgatcgggcgcgtgtgcgtgaccacgaacgaggccagctggttgccggacaggccggcgaacgcccaggcgctcagcgcgagaccgtgcgtggtggagacggtcttggtgccgaagtgctggtcgagcagcaccggcagcgtcgagaaaccgccgccgtagccagcgttgatgaggaacagcatggccagcacggcccacaacagcgcattgttgatgctgttggtgaagatctgcagcaggcataccgcgatcgacatgatgaagatcatctgatagacggtctcgcggcgcttcaggtggtcggagagcgtggagaagcccacgcggccggccgtgttgaacacggagtccacggcgagcaccaggccgatgatgccggcgatggcggcggcgaacttggcggggctcaggccggcatactgtgggaaggccttgagcacatcgtgcaggatgtccttctcctggctgataagcgccaggccgcaggtgatattgatgtagaaggcgatccagatgccccaaaacacgggcttcctgagaatctccgcgcggcttacatgcgaggtcgcgggatcgtagacccagtcagccggacgcttgatgagcaggaaaccgaagaacatcatcaccgcataaatcacggcgaggatgaagaacatgttgaccagccccaccgtgccgatcaggtactccatcaacgggctggcgatggccttggccaggccgaagccggcgacggcgatgccggtggcgaggcccttgttatcggagaaccagagcatcaggttcttgaccggggtcaggtagccgacgcccaggccgatgcccatgatcgcgccgtagcagatgaacacacccggcaggaagttcagagcgatgctcacgcccgtgccggcgaagccgaccacgaagcagaccatggagacgagtgcggatttcttgatgttcttctccaccatggggccggcgaatgcggctgacatgccgaggaagaagatggcgagcgagaagccccattccacggaggccgggctggcgttgagcctgtcggcgatgagctgcttgaacacgctccaacagtagacggtaccgattgggatatgaatcagcaatgcggggatgattgcgctggtccaacgattctcggtaaaccttgccattcggtaggatcctttcgtaactggctgtacgatgacctgccggcctgaacaagagccgcatcgctcactcaaggcacatcatgcaggactgttcatgaacatgcgaacaatcactgaacatcattggtgtgcattctatcagcgttccagctcttgtcgacgccgacagcgctactataacgccacttcgctggtgggattgccgatgattgcggtcttgatccgtgaacttattcacatcggaaatgattatgaaatcgtatcaatgtgattgatagggggggggacgtgaaagccccacccgtgtagggcagggctttcacgatatgtgctgatataaaacggagcctccgctcgtcgcggaggctccgtgctgcggtgggctttgcgtgcgcaaagctattgcgcaaagcccaccgctacgttttggccttggaaagcccaccgggctttccaagcggtgttggccgcgcatgcggcccaacaccggccaaaacgtcagcccgtgttctgcaggccggcggcgacaccggagacggtgcacaggatcagatagatgaatcccgcctgctggctcttgctgagctcttccttgtccaccttcttgcgcagcgaacgcaacgcaagcacctgagtgacggacagcgcgtccacgtaaggggagcggatgcggatggcctggccgagcacgtgacggtgctgcagcggccattcgtcgttgacgatcttgagcacccacttggtggtgagcttcatctcgtcgagcaccttcttcgacaggttctcgtcatcgccgagcgccaagtacatcttggcgatgcgctcatcggtcttggccagcgacatctcgatgttgtcgatgaacgtggagaacagcggccactcctcgtacgcctcgcgcagcgtgtcaaggtcgccgaacttctcgcaggccgaaccaaggccataccatgcggcgaggttgatgcgcgcctgagcccaggagaacacccacggaatcgtgcgcaggtcgtcgagcgacttcgcgcccaaaccacgcttggccgggcgggagccgattggcagcaggccgacctcggtaagcggcgtgacgatcgagaaccacggggcgaagtccggcgtgttcagcaggtcgaggaagcgctcatgcgaggcgttgtccagaacctcggtcatctgggcgtacttctcggtcatctccgtgttcgtcttctcgacgctcggagcggactgcagcagcgtcgcagcggcgacggattccagatggcggatggccagcaccgggttgccgtagcgggcgaaaatgacctcgccctgctcggtgagtttgaagcggcagttgacggagcccttcggctgggcgagcaccgcgcggttggcggggccaccgcctcgaccgacggcgccaccacggccgtggaacagcgtcaggtcgatgtcatgcttcgcggcccaagcgacgatgcgcgattcggcggaatgcagcgccagcgtagcggtggtcgggccggcgtccttggacgaatccgagtagccgagcatgatctccatcttgttgccggtggccttcagacgagcctgcacctcgggaatcttgacgatctcttccagcacgttcacgcagttctgcaagtcctcaagctgctcgaacagcgggatgacgtcgatgaccggcacatcctccgggtgcgaaaacgccagacggttcagctcgtacacgtcgcgcacgttctgggcgctcttcgtgaacgagatgatgtagcggcgggcggccttgatgccgttgcgcttctggatggcaccgagggcgcggaaggtgtcgagcacctcgtgcgtcatcggctgcagttcgccacgctcgccgtgcaggccgtgctcgcggatgtcctccagcgcgcgagcgtgcaccacggagtgctgacggaactccatctcgaccatgtggaagccgaaggtctgcgcctgccagatcagatcctgcagcgggccatacgccgaacgcttggcgccggcttcggccagggaacgctgcacgacctgcaggtcggcgatgaaatcgtcgcagctgtggtacatgaggtcggcgtcgcgctcgatggtgtagcgcaggcgatcggccatcaccagcatgacggcgcggtgcagctccttggtggagatcagtgcggccttgtcggtcaggcgctcgctcatctccttctggtggctccacaggctcttcagctcggcgctggccggggtcgtctcggactccatggtcaggttgcggccgaccgtgcgggtggcctcctcaagggcgccgatcacatggtcgctgaacttgcgggcgacctgacggctgaccttggcggtgacgttcgggttgccgtcgcggtcggagccgatccagcttcccggatggaagaacgccgggcactgcggctgttcgagaccggccttgtcgcccagcagccagtcgttgaaacggtggtagaccttgggaatcgtggtgaacagcgtgttgtcgaagatgtcgaggatggtatcggcctcctcgaccggcgtcggcttcttcagcgcgatcggggacgtgcggaacagcgcgtcgatctcgttgtagaggcggcggacgttctccttcttgtcggagccgccgaggcgcttgttctcttccagcagctccgcgatgcggcggatcttgccttcgactgccttgcggcgcgcttcggtcggatgcgccgtgaacaccgggtggaattcgagcttctccagcaacgccttggctttggccggccccatttcggtcagcagctgatggtaggcggtggtcagttcgttcaccgggtcaacggcttcgtcgtcttccacctggttctcgcgctggtgcagcacggaaacgcggtagttctcctcactcaggttggcgaggtggaaatatgtggcgaatgcgcgggcgagcagctgggcgtcgtgcagattcatcgcatcgatggtggcgacggcctttgccagaccatcctcatcggggtgcggatccgccgtcgctccggcgaaatgctcggcgcttgccttcaccgcgtagttgcgcacggtgtcgaacgtcgccagcagctgcgggtcatattcgcccagtacgtcgcgcagaatgcgcaggcacaggctcatgtcgttgctgagcgactcaggcagctcccgctcttcggggcccttggtcccagtgccggtcgacacgatggtcgcgtcggcgggcgtgatctgttgatcggtatcggtcattcataacctcctttgtcttttgggtccggttgctcggtcagtcggtcctccgcggctcctccgcggttgtgttggccgtcagttgcgagcccacagccggttgcgccaaaagctgtgtgcccattctattgccctgaaatcgcaagttgtattacgaagtccaattttcctctgaaggattactggtaaacatgcaaccttcaccatatcttcacgctgttggatggcccgggaatgtcgtcctgaatatcctcgtcgccgaatcgtccataatcttgtcgaaggtagtccatcatgcgaacgccggtttcggtcataccccatgagttcacggcgcggagtaagaatgactactgtaaccatctcgaaaacacgcccgagcacacccatagggcggcaaaaacaacggcatgatacggatagagaagaacatgcaacagcacaagaacggcgacgcgccccatcaggacgcggcgacggcggtgagtcatttccacacccactccgttccccttgacatggaagacattcgacgcgactgggacaagccgatctccgaggccggcctcgccgccaagaccagcgtcgtcgtgcgcgtcggcgcactggacctgggtgctggaaccggaagcttccgcgtgcgcgagatgatgcaccgcatcgcgtaccccctgggcgtgcacgtgcgcgccgacgtgaacctgacggacatcgaggccacctgcaccgatgacgccaaccgcatcaccgaggtcatcgacctgcccaccaccggcgtcaacaccgagcgcatctggctgctggagcattacaccgactggttcagcgtgaacctcgggctcgattccatgtaccatcgcgcgggcgacgtgtccgaaggtgtggtgcagaaccttgagcaaagcgacatgtccgaggtctccgcgcagctggccaagaaactgcgcgccgagaagaaggcacagaaggagctcagcggcgaggcctccgacgacccggtgctcgacgccctggaggcggccgaggtcaccgtgcccgtctccatggtccgcgcggccgcggccgacatcgccgcggaaggttcgacggacgacgagctgcgctccgaatccgaggccgccctgaaagaggattgcgaggccaagctgctgcatgaccggttgatgcagcagcgctccggaaagcatgatttcgtggagacgccggatcttgacgcggccgccgcggcggcgggtggcgcaggcgcggacgcgggcgcaagcgccagcagtgcggaagaccagaacctgaacgaattcgggacatcgatgtcggcggaggcgctgctgggcgcgaaacgccggaaaacccgcgcccacaagccgctgaccggcgagtacgccgagcatttcgaccacgtgggccgttccgcgggcgaagggcgcaagcccatcaccgtgcggcaggcgcatgagcggctcgacctgatcgagagccgtaagccgctctattccccggcgttcgccggcttcgcctccgcagtcgcctgcgcatccttcgtgttcctgctcggcggcggcccctacgacatgatcggcgcgttcgtcggcgccggactgggccactggctgcgccgcaaactgttcgcccgccatctcaaccagttcttcgtgacgttcgtgtgcgtggccctggctgcgctcgcctgcacgggcactctgcgcctgatcggcctgctcgacccgatcgcgctgacgcatgacaccgcgtacatcggcgcgatgctgttcgtcatccctggcttcccgctgataacgggcggcctcgatatggcgaagatcgacttcccgtccggcatccaacgagtggcatacgtgctgtgcatcatcctgatggccacgctggcaggctggggagtggccatgatcgtgcatctgaacccgaccgggttcgagccgctggggctcaatccgtgggtgaacacggggctgcgggccgtcaccgccttcctcggcgtgtggggcttctcgatcatgttcaattcgccgcagcgcatgtgcctggtcgccgccaccatcggcatgatcaccgacacgctgcgactgacgctggtcgatttcggggtgccggccgaggccggggcgttcatcggcgcgctgctggccggtctgctcgctgccggatggcgcaccgccgtgcacaacggcctgctgccgccgcatctgggctatccgcgcatctgcctgaccgtgccgtccatcgtcatcatggtgcccggtctgtatatgtaccgggcgatgttctacctcggacagttcgatacgctgcacgcgctggactgggcgttccgagcgttcatggtgattatctgcctgccgataggtttggtgatggcccgcgtgatcaccgataagtcatggcggtatgacgtctgacgccttgcctgcgcagcggacggttcccgatgggattcgtgtgaggaatcctcatgcgttccttgtcgggaatcattcaccgtgcaaagaggagtacgtccaacggcctgcgagcatggtcgccgccaccggcatcgcccgcatctcctccggcgtggagacagcatacgggtcgcggtccaagagcaccaggtcggctggatctccgggctcagggcggtcgcggccgacggctgtggaagccgccagcgcggtgcgcgcatccaggcattgctccggctggaacggttcgcggtctgagctttccgtgccgaacacagcggccgatatcgccatccacgggtcgagcggcgcaaccggcgcatccgaccccatgcgcagcctgacgccggcatcgtgcagtgccttgaatgcgtaagggattccacccggattcgcccagaaccgcgtgatgacatcgcgatcgtccatggcgtgctgtggctggatgctggcggtcagcccgagcttcgcgaatcggggaatatccgccggcttcagcatctgggcgtgctcgatggaaccgtgggcgtgtgtgcttgccgccgcgttgagcacgatggtgttcgcctcatcgccgatggcatggcacgcgatggcgaacccatggcatgtcgccacgtggaaatacgtctcgatctggtcgggtgcgtaactgagcgtgccgtaaaagtcggggaatatatcggaatacggcatcgagcagaacgccgaacgggtgttcagcgagccgtccgagatcatcttcatcgcgccgacgtggcccagtccatcgctgccgggcagctcgacgcccgtcttccagccggcttcaatcgcatcctccagccgttcgggatacacgcccgcctccacgcgcaatcctcggatgccgtgggtgaatgagccatcccaatcgatgcctgtccaagcggaatcgttagcgtcgcgcgggcggggagacgccgcggagaaccggcgggtccacgtgtcgacgttttccgccatctcatagtcgcggatgccgaccacgcctttgcgggcggcatccgcctcggccttgcgaatcagttcgagcgtctcctccgccgctccgggcgcattgtcgagcttgcagtaggcgtcgaaccattcgagctcgcccacaagaccggactcccccacggtcaggcccagtcgccgcgccgccggttgccgtcgccgagatccgggagccggcgggcgtgattgccgcaatcgcgccgcccttgatcgcgatgtctacgcagcggacgctgcccgggaaccgcgcgttggtgattatcgtcataatcgcctgtacctgccatcctgcatcagatcagaaggtcatgggcgcatgtggcagaaacatcgtacatatccgttcgcgcctcggttgcttggccagttacaccaatccccttcaccgtacccccccctaattgtgtggcgtcaccttcggcgtcacgtttaaatcgtcttcccagtgtacatgcaagtcttctgtgaacagaacccgccggtgtgtacagtcgtgcgaaagaaggcggccggcgatttcctcatgcgcggtctccgccgagccgaggtgagttatccaccgcgttgcgcacattcatccacatttgtccacattttttgaggcgcggtagacggggaactgcccggttccctacactcggctccacggcaatattcgagtcacaaaggagcggccgaccatgggcagatcaatcgcactgatgcaattgacggagttgaagcaccagcgtatgaagcagtgcgctgaattccggcagcgcagcaggtggcagccgccatacgccttgaccacggccctggagcttcaggcgattgaaataccgcgcctgccaaaaggacgcgccatgttgaacggtattacagttgtcgtcccgagtgccaatgaaaggcgcaatctcgtcggcataaacgaagtgacatggtccttccctgttgatgtcgtcatggtcgagcaatgcttgtgcgtgtctccggcctgcacatgggcgatgttcgccggatggctgaatctcgaagagctgatcgtactggcggagtcaatgatgcgccgggatgggcgtctgcgcaggacgaccattgaggagctgacggcgtatctggattcggcgcgggaattcacggaagcggtctttgaagagacgggccgccggccgaatatgtttcgcggatatgccaattgccggcgtgcgttgcgtgtgattcaggaggggacggattcgtcgatggaaacgcgcacccgactcgttcccctcaaatacgggatagacgcgccctgcgtcaattacaagattggagtgaagcgtctgaaccgggccgtatatcttgacctcgcttacccggaatacaagatctgcattgagttcgacggagggcatcacgccggtcaatggctggaagatgcacgccggcggcaggcaatcgaagacgagaagtggcggtatatccaagtcaccaagcttgacctcggtgatgaatggagtgaggaagctttggccagacggatcgcggataagatccaggaggtcactggaattcccgtgcccgtcactgcgcggaagaccatccaacaggtgtgcgatgccagagcgatgagacgcaagccactgtacgagcggatagggtttgaaccattgttgccgcgagtcccgaacgccaatgccgattttcctgacgcggatgaccttgacggtatcgcgtgatcgaaggcaggggtgcggcatcgcacgattgcgctgatgtgattgcgttggaaagagaagcggagggctgtagctggctgcgccttgaccggatggcgtcttctatgacgctatctgcgtctcaaggggttgattgggcgtcctctgggcatctatctgcgtttcagggggttgccgaaacgcgatacccggagtattgccggtgaaatgccattgggatcatgcggtttgaggtgcgtttatactttggcaccaacccctcgaaacgtagatagatattcggcgcggtccaaatcaacccctcgaaacgcagatagccttatctcggcgagttcgacgggttggggcaggggcgtgcagacggctttctgtcccgaagggcgacaccgttatgggaaggccaccttcgtcgcgtgcctcggggcggagtgacgaaggtggcctgatgcaatcgttgcgttcgactgccggaaaatcagtacttcatgcccatggcctcgcgcacctggtcaagggtctcctcggcgatggcgttggcgcgggcgttgccatcgtgcaggatgtcgcggatggagtccatgtccttggcgagctctgcgcggcgctcgcgatgcggggcgaggaactcgttcacggactcaatcacgtacgccttgagcgcgccggcgcccgcatcgccgatttcggtggcaatgtccttcgggtcgcggccggtcaccagtccggcggtggtcagcagcgcggacacctgcgggcgggcgatggggtcgaaggtgatcttgcgctcggaatcggtcgggctcttcttgatgagcttggcggtctccgcggcggtggcgcccagcatgatggagttgccgtacgacttgctcatcttgcgaccgtcgaggcccggtatctccggtgcgtcggaaaggatcgcggcgggctcggggaacaccgggttcttcttggcgtagcgctcgttgaagcggcgggcgatggtgcgggtgatctccacgtgcggcaagttgtccttgccgatcggcacgacattggccttgcagaagaggatgtcgcacgcctgatgcacggggtaggtgagcagcaggccggtcagcgcgtggccggaggcctccatctcggacttcacggtggggttgcggtgcagctcggcctcggtgacgagggagaggaacggcagcagcagctggttctcggccggcacggcggagtgggtgaacatcatggtcttggtcgggtcgatgccggcggccatgtagtcgagcacgaggttcagcacgttgtcctggatgtgctcagtggtgtcgcggtcggtgatgacctggtagtcggcgatgatgatgttggtgttcactccgcggttctgcatggccacgcgctccttgatggagccgaagtagtggccgaggtgcaggcggccggtcgggcggtcgccggtgagcatcgtgaatttgcccggctcggcttcaagtttggcgagcgtggcgtccgaacgcttcttcgcggccaggaagctggcgctcatttcgttgcccgctgcggtcagttgctgctgttcttggtccgtcataagtcgccctttgcttgcttcaaaacgccgaaaatatcgcttttatcgtaaaagtctaagcagacaaccatttctctcataacaagtggtactctcttatgtgatgaattgatagttacatttacatgccagggggtcacatgggccgcggacgtcagaaagcaaaacagcagaaaatagcccggaagctcaagtacctgaccaccgataccgattacgatgagctcgccaaggagctgagcacgcaggagccgggcgaggggtcgcccgatccgtttgccgatatcgaggcttcgtattctcatgatgcgaacgccgccgtggacaatacgcagggatccgtcgctgaggatgaccttgacgagtacgccaagtgggctgccgaggctgcggcgaaggcgaccagtggcgaaatgccggccgtgaaggcgcctgaatctcaggctccgaagcccaagccgatgccgcgcaagccgattcccatgcccatgccggccgcgctcaagcccaagaaggcatgattttcggatttcgtcgctgctggcccggtggtagggccgcattgacgcgatttcgtatgtcatgatgacgattccgttgcgatatgcgatgacagcgatgctgacgcccagtacgtgcgctcgctgaccgcatcatgggcggccgctcggcagctggagccagatagatgtattcccgtcggcagagcggtttctgacgcgctatgggcggcggcgtgacgtcgatattctgctgctggacgtcgaaatgggctcgatggacggcgtggcgttggcgaaggccgtgcgcaaggcgggcggcacgatgcagatcgtgttcgtcactgggtattcggattacatcgccgaaggatacgacgtcgaagcgctcaattatctgatgaaaccagtggatgcggccaagctgttcgacgtgctcgacaaggcggtcgcgcgcatgcgccgcgattccaggtgccttgatctgcaatgcgcgggagggctgatgcgtattcctctggccgacatccgctatcttgacgtgcgccgtaattatgtgacggtgcacgccgaccgggattatacggtgaaacgcccgctgggcgagttcgaggccgagctcggcgacggattctgccgggtgggacgcgcgatgatcgtgaacctgcggcgaatccgctgcgtgggcaggtcgtccgtgcaatcgaccgacgggacgacgccgccactgcctcgtggggcgtacgagccgttgaatcgggcaatcatagaccagacatgattgcgcatggccggctcacggccggcagggtgccggaaagccgtccccggctggacggggcagagcgcaaaggaggggcacgatgtggttccgtgggcgaggcaaggccgacagggccatcgcggcatatcagcgcgagctggtcgacacgcattaccgcgaggtcgagaacatgtaccgtcagatgcgcatgtggcggcatgactaccgtaatcaccttcagacgatgaaggcgttggataccccgatcaagtccggcaatgcgatggccgacgcgattctgagcagcaagatgtcgcttgcacaggcgcatggcatcgacgtgcgcgtggacgcccatacccatattccgatcaagctgcgcatttcggaactcgatttgtgctgcgtcctcggcaacctgttcgacaacgcgatcgaggccaacgacgggttgcctgaagccgattgcatgattcgcgtgtatatggacatgaagggcacgcagctgtacatctcgttcaccaacgcttcctcgggcggcaagcagcgcaaggtcggtgggcgcttccgcaccaccaaatccgacgaggggcacggtttcgggttggtccacatcgaccagatcatcgaggctgcgggcggctacctgagtcgcaacttcgaggacggcgcctccaccacggagattctgctgccgcagtcctgatgacggcggtgcgggctcatgagagcggattgtcgatgcgcgtgctgcccgccggcgagggaggaagctggggccaaagccctctccttggactcattaccggtgaatccgtgcaagatagcgtccgcacccggacccgaacgccgcagccgttggcatgcgacggtatgctggaatggtgaacagcatggcgtacggcggcgtattcgagccgcgtaatattctagtgaccggcggatgcggcttcattggcgcgaacttcgtgcgatacgtggcgcggaaccatccacacgcgcacatcaccgtgctcgacaagctgacgtacgccggcaatccggagaacatcgccggcctgccgccgtcgcaggtcgatcttgtcgtaggggacatctgcgacgtcgcgctattggagcgtatcgtgcccggtcacgacgccatcgtccacttcgccgcggaatcgcacaacgacaattccatcgccaatcccgaaccgttcatccgcacgaacgtggaaggcacgatgcggctgttggaggccgcccggcaacacgacgtgcgcttccaccacatcagcactgacgaggtatacggcgatctggcgctggacgatccggcgcgtttcacggaagacacgccgtaccgtccctcaagcccgtacagcgcctcgaaggcgtcgtccgaccatctggtgcgcgcatgggtgcgcacatacggtctgcgcgccaccatctccaactgctccaacaactacggcccgtaccagcatgtggaaaagttcattccacggcagatcacctccatcatggagggcgcgcggccgaaactgtacggcaccggcgagaacgtgcgcgactggatacatacggaagaccactcccgcgcagtgtgggcgatcctcacccgcgggcgcatcggcgaaacgtatctgatcggagcggacggcgagatgagcaacatcaccgtgctgcgcatgatcctgcagctgatgggccagccggaagatgcgttcgactgggtgcgcgacaggcccgggcacgacagacgatacgcgatcgacgcatccaaactgcgcgccgaactgggctggtcgccgatgcacaccgacttcgctagcggattgcgcaacgtcatcgactggtatgcggaacaccgcgactggtgggcgccggccaaggaagccaccgaggcccgctaccgcgcgcaggggcagtgaagcgaccgcctctacaggcggcctttccgcggcaggtcaacgttgcgcagcagccgttgcaagggcttgagcaccacggtgtcggcgaccaccgcgaacgccaacgccgcgagcagcgtggcggcgaacatcagcacgctgatgcccgcgtacgaccatccgtccgtgggcgcgggaatccgcggaccgatcagcaccttggacagcggcgaatgcaccagatacatcgtgtaggagtatcccgccagccaggtgggtagcagggtgcggttagagttggcgattagggcgttcgcgccgaattatttgggtttgatgactttattcgagagaggctgacgaatggtttcgccacatcatcttttgaagattgcgactgcgctgtctgcggttgcgttgacggcttccgtcgcggttacgccggcttacgcattgcaggatattgcgattgaggatgctgtcgcgcagagcggtcccgttactgcagataatggcgttgttgtgcagtctgacgatcagtctgacgatcagacgggcgaccagcagtcgcaagacggcatgcctgacaatccgaatgcgaaacttccggataccgtcagtgacgagatttccgacgatgccaccgtggtttcggaagacctggccgtcacccctgaaggtgaggtcaagaatattgaaaccggcgaaaccgtgaccgatgcgacactggtcggtacgcaggatcagcagccggatccgctcgccaaaactaatggcgaatccttcattccggtgagtgcggaagatgtcaaaaatgctgtagccgacgcgaacgtacagctctccaaattcgaaggcaatgaatacggcgcgcactggggcacttacaacaatacgaaagccttcttcgactaccagaacaacctgttcgtgcagcaagccaaaggcgtgatcgacgtttccgaatggcagggcgacatcgactgggccaaagcgaaagccgacggcgtggaaggcgtgatcatccgcctcggctacggttggggcaacaatgctgacaggaaagcacaacgtaacatttccgaatgcaagcgactcggcatcccgttcggcatctactggtattcctacgcggacactccgtcgattgccaaagaagaaggtgccggcgtggtcgccaaactcaagcgattcggtgtgcgcgcgagcgacttggcgtaccccgtgtactacgacctggaaaagtggacgtggaaggggcatcagccgcccaccgatccgaacgtgtacaacgatatcgtcaacaattggtacggcgcgctgcagtccgccggatacaagaacctgggcgtctactcgtacaccagctacctgcaaggcccgctgaaacatgccgacatttacgccaaaaccacgtgggtggcgcagtacggcgcttcgactcgttcccgaccaacagtcgcggatggcaatacaccagctccggcaaagtgggcggcatcaggggcaatgtggatatgaatgcgtttgggaacaaggagtatgtgaatggcgggagtagcaatgatttacaagcggccattgatgtgcgcagaatgactgcagttaccattccgaatggcaattattacatcaatgttcgttccaaagtcgcgtccagcgttgatattactggtggaagtgccgcagattccaccgccattcagttgtattccggcaacagttccaaggctcagcagttcacttttactaggcagtctgatgggagctatgagatcgtcaatgtgaattccggcaaggctttggacgtgcgtaatggtgttgctgagaataacgctgtagtgcaacagtattctcgaaataattcccaggctcagcgatggtttattcgtgattccggagcgggatattatttgcagtccgctctcggtaattgggttctggatttgagtggcggaaatactgcgaatggtgctgcgattcggctgtatacgccaaatggcactgcttcacagctgtttgttgtttcgtcaagcgatgtcaatatagctactggagtgtcgatgattatcacttcggttgcgaataaaaaacttgtcacggatgtgacgggtgcgtcaacggcgaacggggcgcgagtccagcttgattcaagtaataatacgaacgcccagaaatatcgatttgaatcaatcggcaacggaacttacaagattatcaatgctaattcgggcaaggtgctggatgtggctggcggatccactgctgatggagcggcgttgcagcaatatacgagtaacaatactgttgctcagcagtggacggtgcggaattacggcagtggcaggattgcgctggtgtcggtgaacgccaacaaagctgtcgatattccaggtggcaatgccgtgcagcaggctcagttgcagctttattcgccgaatggcactgttgctcagcagtggttggtcgcaaaggcgccgttgacgttgcgcgaacgtttgaatgaaaccgcagccaagcataggcaagatctgccggatggcacctacacgttcggatcgaagcttagtacgtccatgaagatggatgtaagcggcgcttcccgttcaaattatggaaacgtgcagatctgggccaataatggaaccaatgctcagaagtggaaagtaacgcatgattccaacgggtatgcgaccttgaccagtgtgaactccggcaaagtgttggatgtgaatggcggcgtatctgccagcggaaccaacgtgcaacagtacgattccaatggaacatacgctcagaagtggatagcagtcaagaattccgatggctcatacacgttccagtcggcgctcgcggaaaatgcggtgctggatgtgaatggtggttccagcgcaaacggcactaacgtgcagttgtatacttccaacggaacaaatgctcaaaagtgggtgaagtagtttgtgtctgtatcgcgcagtttgatccagacgatcaaactgcgcgatatgcgttatgcgtttgcggacggtgtgaatcgacgatcttctccgtccgtttctttagtgagataaagtggacgatgcttgacctcggtataggtcttggataggtattctcctacgatgcctatgcaaaatagctgaaggccgccgatgagtagcataatgctaatcatgcttggccatcctgcaactggatcaccaaaaagcaaggcacggactacaacaacgatgatgcctatgaatgcgatgagacagcagaagacgcctaggaaagaagaaagtgcaagcgggactgtagagaaaccggcgattccttcaatggaatatttaaacaatgaccagaaattccattttgtttttccggctgctcgttcaatattttcatatgaaatccaatgggtcttaaatccaacccacgaaaaaatgcctttagagaagcgattatattcgcttaatgataagaccgcgtcaacaaactttcttgtcatgaagcgaaaatcacgtgctccgtctacgatttccgttccagacattttgttgatgattcgatagaacatctttgcgaaaaaaactgcgaattggtggttcgcctttacgagttttcctacgcgttgcgacacaatcatagtccttgttctcaagaaggaattgaagcatctctggtatcagagatggagggtcttgaagatcggcgtctaaggtggctacataatcgcctttcgcggcttttaatcccgcatataaaccagcttctttgccgaaatttcgggagaaagaaatgtaatggactcgttcatctttcgcatgcaatgctcgaagcttttcgagagttttatcgccagaaccatcgtcaacgaagatgaactctgcttcagcatgagactgttgacgcagaacattggcgacacggcaagcctcatcgtagaaaagaggtagcgactcttcttcgttgtagcatggaacgacgaagctaatgagcattggtactgtgtccttttcgctagggtaatcagcgtgtgaaatcatcaagcttccacttctttagaatgatacatcgttactaggttcttgtcttgcgctctggcgagagagagttttgctaggccgaaagtaatgccgcctgaggcaagtgagccaatattccagcaactgatttgcggtacggcggcgggagagctgaggcgtgctccaaggtgatgtgatatgaactgttttgttccgtatttcccctggctcgatgggagatgatggggccatggcgaaaggcgcgggatgcacgccggagttcagggcgaaggccgtcgggctgttgacggagtcgcgcggctcgtgttcgtcggagaccagggcggtcgaacagggcggatgatatggcctgtttttttgatgctcctatacattgtcaaatgtgttggagtgttggctttgcccgaggattgagtccatccactcgatgatttgtcgttcgagttcgggcagatcccgaaccccacgttcgatctcgctgacgcggctggacggcacgcccaacgcgtcgccgacctgttgctgggttttgccgagcgagacgcgcacttccctcagcctggccccgcgttcgacggcgggttcgcgtccggcttcgccgttgcggatcgcgatgagcgcccggtaggcctcgcgggcgatgtagcgcttgagacaccgcatgatctcgagtttgccctttccctccttggttttccttaccacgtagtccttggtgggttggtggtggctcatgcgcaccagggcgacgttatacagggcccggttgccctgacggttaccggatctgttcaaccggtgccggttggtcttgccgctggatgcaggcagcgggcaggcgccgcagagcttggcgaacgccgcctcggagcggattcgttccgggttgtcgccgccgatgacggccagttgggccgccgacatggtgcccatgcagtacacgtcgagcaggggacgcgcgttctcttccagaatctggcgcatgcggcactccagcacatcggccctgtcgtgcagttcgcgccatgacgacgccagcgtcttcagcgatgagagcacgttccgctcgacgatgccaccggagggacggcaggccgcgagcttgccgatccgtctcttggacggcagcgaccggtacctctccctgattccttccggagcggtggtgagcaacccggcaagacagttcgatatggccgtcatggaggtgacgagctgctcgcgtgcagcgatcaggtggcgcaacgcctcgcaccaaccgtcggatgccttgggcgtgctgatcccatcgccggcgagcacgcttctggcggcggctatggcgtcgatgggatcggacttgccgtcgctgcggcgcacgctgcgtttcggccgcagcacctcgtgcacggtgtagccggctgcggcgagcctgcgcgagagcgcggcaccgtacgagttggtgccctcgacgcccacgcccaggcacagggccgggtcacctatcatggcgatcagccgttcgtagcccttcgggtccgcattgaaggtctcggtgtcggtcacccgcccgtgttcgtcgagcagggccagtgtgtgggttgttgaatgcgtatccactccggcgaggatcgttggtatagtcgacttcatcgtcggtcctttcatgcgtttgtcgcgatgccgttgccgatggcttccggcacagacagaacgttgacggggcacgctaccatggtcttgctgggaaccgatggagcaaccacgctcctatgaggtcatgttccatggccatcgggtcggtgggcggcgcgggacaaatcaaaaacaggacaggttccaaggaatcgtcagttccgcccggggtcaccgcaccgtccatcatccttcattatcgccggtcagctaaaccggcataaccattatcaacgttccgcctttatagtgaggcggcttgtgccgcttgatgtcgatggtactcggtttccgccgcctgcggtgtcctgtagcccagggactggtgcaggcgcttcgagttccgccacgagacccaccggaacgtcgccaattccagatcatcgatatccgggaatggcttgcgccgccggacgagctcggtcttgtacgcgccgtcggcgctttcggccatggcgttgtcgtacgggtcgccgaccgtgccggtcgagggcagcatgccgtattccttgacccggccggtgtaggcggtgccggtgtactgcgcgccatggtcgctgtgatgcacgagcccgtcggtgccgtcatgcgtcgcggcccaggcgatggcctgttccaacgcctgcagcggcagctcctcggtgcccatggtggtggcgcacgcccagcccacgatgcgacgggcgaacacgccggcggcgaacgccgtgcagccgaacgagccgttcgccatgcgcacgtaggtgatgtcggccacgtgcagccggttcggcgcactggcctcgaacttgcgttccaccaggtccggccgtccgcccgcgcccttggcgggcctggtcgtcaccggggttctgccgcggcgcacgccccggatgccgagcccgcgcatgatgttcaccacctggtcgcggccgacctccgtggggtcccggccctgggcgaccagctgggcgtgcgtcttcctgtacccgtacacggccatgaagaaatccgaatgcatcgtcatgatggccgcgcgccaaagcctcgtggcgcgcggccatgcggctcacgggcccggacctgaacatgcggcagccgcgcggcgtgaggaacccgcaatccaacgactcggcgaggacccggcatacaggcccgaccccgaaacggtccttgaattcgtcgatgtacgcgactttcaacgccgtgccgggtcgagcctcgccgcgaaaaaagccgacgccgtcgtcaggatctcgttcgcccgacgcagctccgcgacctcggccctcagcttcctgagctccgccatcgcctcctcggccgactgcctggtctccgccgccacggtggcgtccgcctcgttgcgccaacggcgcagtgattccggcgcgatccccggatccttggcgacctgttcgatcgccttggtctccgatgaatacgaggatcgtgattccgtcagcagcctgacggccttcgccctgaactccggcgtgtatctcgtgccctttgccctggttccatcatctcccaatcagtcagaggaaatgcggaacaaaaaacagtccatatcaccgtcccgtacgcgtacgccggggccaccgtggacctgcgcgtcggcgcaggcacgatcgaggcgtggcacgggggatccaggctctgcacgcaccggctcctgccatccacggccgtcaaccagtacagcacgaacgatgtatttcgtcaaattgaggtggacgtgttcggcacttaatctggacaccgtcggcgttcaacttgaacaccgtcggcggctggttccttgttttgttgtttgtttggtttatttcatgagggagtgtttgttccggtaggattcgccgtggaagcggaggatcctgccgtggtggacgatgtggtcgatgaccgcggcggccatgtccccgtcgccgaacacgtcgccccatctgccggactcgaggttcgaggcggagatgacgctgcgggtctcgtagctgtccgcgccggcctggaacaggagcctggccccgtcgatgtcgatgggcaggtagccgagctcgtcgatgatgaccagcccggccctgcctatcgacttgagctcggcgtccaatctgttgtcgtccttggccttcctcaagcgcatgaccaggctggaggcggtgaagaacctgacggggatcatgcgttggcatgcgagcatgccgatcgcgatggcccggtgggtcttgccgcagccgacgtcgccgcagggcacgaggtcctcggcccggtcgacgaattccaggctttccagctgttcgcgtccccagtcggcggggaacgaggccatgcccccggtcgtatccctccagggtcctgctctgggggaacccggcctgtccggacagccgccgccgtttggattcggcccggctcgcgttctccttctcgaacaggttggccaggaagccgagctggccgggcgtggcgtcctccggggccttcccgggcacgctgtgtgtcaacggcaggttgcgggcgaggcccatgacctgttccggcgtggccttgtcaagaacgcggccgccgcgctgccgcggtttttgctggctcattcggcctccttcatgtatttgtcgtaacgcttcagatcctgcccgccttcggttctcgcaccctcgaggatgcgtttggcacatgtgccgatcgccgcgcggtcgacggtccgtcccgcgttgatgacggtttccaccgctttgaccgtggcggcgaacccgcagtcggcggcaacggctcggatgtcgtcgagcagatcggagcgcgtgcgtgcgtccatgcggtcgagcagggctcgcacggtttcggggaaatcgttcctgatcgggctttcgccccatatgcggggctttcgcgcgatgatcgcgagcaggctcgccggatccacctgggttttcgccgaatggccccaaatcctctccggcgtggtgatcgtttcgccgtcggggccccgcagttcgatctcgaagacgcgcaccccggcctgcaggcgcatggaacgccatttcggtccggccggataccggttcgcgtcgatcgtgacggcgccggtcttgtcggccttcacgctcctccagtcgcacgggtcgaaccgcacgccgggcaatggacgcatgtggtccttctccgcctcgaacagttcgatcaccggaacatcatgccggcagtgatccgatccggcgacgcgttcgcactcgtcaagccacacgcgcgtcagcgtttggaagctctcggccgacggcatcggcaccatcaggttgcgcctgacgaagccgacggcgttctccacactgcccttcccgtggccggaatacgggtcgcggaaccgcggcccgaacccgtaatgcgcgcagaacagggagaacagacaggtccgggcggccgtgccgtccggcctgcgatggcccacgccggtggcgttgtcgaacaccaccaccctgggcgccatgcccatgcgctcgaagatccacagcaaaccctggcacacgcactccgaggtctcgccgggaagggcgaccacccagcgcatgttcgaatacgggaacgacaccaccaggaaacgcaccacgcgttcgactccggcgatcacggccctggcctggccgaaatcgacctgcgcgcttcccggcgcccactccaactcggcgaagccgtccgactccatgcgatgctcccgccgccagcgcttgacccagcgccgcaccgacgaatacgagcccgtgaacccgcactccgccacgagccgctcgtacacgcgcgtcgcggtatgacgctgcttgacgggcatgcgcagatccgcggtcagccacccgtccacgacggccgaataccccgcgtcgaccagcgacctgcccgcatgccccgagccaaggggcttgggagagtaatccccgtggttggcgtacttgaccacggtcgtgcgcgatacgccgagtttccgcgatatctccctgtggctcaagccctggcggtcgagctgcctgatacgctgtcggacacacaccggtgccgtcatttcctttcctcccgagaaccatcagtctggttgacaggcactcgggaatctaccaaggaaccggacgatgccggtgttctcattccaccggcgccatcaccgccgacaccgtccagattgaacgctcagggtgttcaggaacaagtgccgacagtgaacacctttattcgatcacgcacaggcgcattccggccgcggctgccattaccggtggcccggatggctgggcctcatggaacggtatggcccggcgcggtcgacgggcgcgaagggctgttctccggacggcgccgccgcggaggggttcttcggtcgaatgaagacggaatccgtctatcccgggcatcgggaggaacgtacccgcgacgaggtgctcgtcctgatcgacgactgcatccgctggtacaaccatgagcgcatcaagcaatcactgggttggatgagcccggtacaataccgtcagagccagggaatggctgcgtgattatctccaagaaaacgtgcgcagccccctaccagggccgcagcccgggcaacgcggccgcggagggcttcttcggacggatgaaggtcgaggccgtccaccccgagaagcgggaggaacgaccccgcggcgaggcgctcgccctgatcgacgagtacatccattggtacaaccatgagcgcatcaagcaatcactgggttggatgagcccggtacaataccgtcagagccaaggaacggctgcgtgatcatctccaagaaaatgtccgcagccccttatccaggcgttcctctgtattttcggttttgtgtcttggcggaaataaacctaacaggagaacgcccctttcatacccgcatacaggaaaccccggcaacgacaccagggcccaatccctcaccacacaaactggcgaagactctcagaaattgacgatgacgatgccatctttttctgccacgcttccaggatctggccaatggggcatcgattcagctagcctttcgctctgttctatttgctgagatgttgcgctgttgtaataaactccgagtatatcggccatgaattgtttctttatgccggtcccatgctcagtggagaaaccgatttccaacatagaacggccagtaaggccaagctgattagccgaataacaatctggattacatttggcaacgtgatttcccacgaatacaagtggctcatcaggacgttctccgagtcctaatttatctatacgagactttattgcttgtgctgtaagcacatcttggttgaagacaatattttccgtgtaaaaaattctgctcgttatcagcgcctgattccaaccgatagcgataattaagatccaaggaatatttttgacaatagactttgcatttctttgaataatacaagtgataatggcgaacgaaaccgccgtaataaatgagaaagctagtggataagtcatttctgtgcgtacggatggagcggcgccaaacacaatggacataatcatcggagctagcagtagcagtatagataccaataccgcaagaacagtaatgcgtttgcgaatcgcgcatattattgctccaaccgcgaagataattgcaatgacagggaacaatacgctgtaaaagatgccggatccagaatacaactcctgcgcatggtggacgatattgcggattattgtgccaaacgaatctttaccccagcgtgattggtcggatatataggcattggttgttacgccggcaagatgcatagcaactgcattgagcaatctatacgcaagatatgacgcaccgaagatgagaatgctgcctatcaaaaaaatccaagaagattttttctgttcgtcccactgagcgcgactgccaaatcgcaatacatagagcatggcagtgccagtaatgaaaatcgtgaccatggcaagatacattgtaaatgaaatcgtagcgcacacaatggcagctatgactaacggaatacgacgttttatgctgcggttggttgccgcgttggcccacatcattaaagagattgcagtcagtacagccgcgatggagatttccgggccctgtaacagaaatcctaacatttcagcgaaaataggtgagacaacataaggaatcatgaagaatgctggttgcagctttgtgtcgcgagaagctgagcataggaaatatgcccatactacggcagacatgccgaagaataccaccatggtgaacgaggctagcgcattgttatagaggtaggtaccggtcagtttcttgaacaataccaagccgaagcgttcaagctcaaaccacgacctgtatagtgcatcattattttgaatgataccctgggtgtcaatggaaaaggtattgctgaataacttctgcccaaatgccaatagaaggaatagcgcggcgacgactaattgtccggtattgtgcgtgataaattgcagaaatcctcgcaatgaataacctgccaaggggccagcggcatttcggtttacgcgtggagccgttgtatccatgctgatcgatgctgtcatttggcattcctcacttatctttgatgttctgcgatattattttcatcgggtgctgttgaagttcctcaagctcatatactcggcttagctgtttgttcagctcactctcgaaatactcagctcgcggtttgaagtaattcacgaattcctcgtttctcttcaatgcgatgttcagctcgtcgattcgttgtgccaacccgatggatcgatattctgcgtcaaagcatttctgcaccagatccgagaattgtgcagcctgcgaagaagggttcggagtgatgatgttcccttgtgtaatcagtgtgaacagtttgtcgaaatggtgattgagctgttgctgaatatcggagaaatcgactggttgctgtgtctttaaagcgtccgatacggttcctgcgagcttattaccatcagtgacatagaaagcgtcacgtccaagttggtgatacaggtcttgagtcttcttggtctgctggtaatcgaaactcaccgttttacgtccaaatacggatgcagttacggatccatgcagactggtgcctacatagatttcgcagcttgacagaatgccgatgatttccagcaaggaaagcgggtgttgagggatgagacaagggaatgggcagatatcgtggatggtgcggaggatatcctcatcgccatgtgtataggccagtggcaacagcacgatttcatagccatcgtcatgcaattccctgagcgtagccacaacattgtcgatttcgggttccgggatgaaacggttgcagtggaacaccgcataatgttgtagttcagggaacacacggttgcacgcatcctgaagctcctgatcggctgcgacattcctcagtgagaaaccagtatcgggcacacgctgaatggtcgtatccgatatgccgcagtcgatcagcacctgcttggaaaaatcattgcgcacgctcaaataatctatattgctgaacaggtagtgggcaagagtcttatccgcttcaaagtcaaaaggaatgccgggcgcattccacagcaatggaacattgtatttcatcttcatgaagcaagggacaagccagaccttatccataggataagcctcaaagtcggtactgctgaaggtgcgtttttgcccaaagcgatgccagtggatgatctcccccccgcccacaacgatggcggaaaatggttcttccatatgcatacgttcgagatcgtcaagcgagtggacgttggagttctccacgaagctttcctcagtttggaacggtgagaacaacaccacgttaccggtgtatcctcggcgtgagagctccttgcgcaataccaggggaaagaggtggtctccgtagttgggaatatcgaagaccccgcatagcgctattctgcccatcattcctccagtatccagatacggtacagctaatcagtattcatcatactggctgagggacggatgccagtaatgataacgggcccatatgatattctcgtgtctgtttacttcacttagaagaggaatagagcaatccatgattcttacgtctgatacgcctatcaatcgtctgggaattttcttcttttacgacgctcaaggggtcgtggacgactatgtgctgaagctgcttgatggtttcatgccacacttctccgacctgaccattgtatgcaatggaaagttgaatgatgcagggcgcgagaaactgctgcggtacaccagcaagctgattgtgcgagagaacaagggttttgatgtatgggcatacaaaaccgctttggacagttacggctggcacaagctggaacagttcgatgagattgtactattcaacgccaccattatggggccggtgtatccgttctccgaaatgttcgaggcgatgagcaagcgggatttggatttctggggtatcaccaaattccatcgtgttgagcacgatccttttggacgcagcccgtatccctatctgccggaacatattcagtcacatttccacgcctatcgcaaaagcttgcacacaagccaggcgttcagagattactgggacagcattcctcccatcaacgattattacgattctgtgggtctgcacgaatccctgttcaccaagcgttttgccgataagggattcaaatgggacgtgtatgtcgatacctccgatctggaggggttcacatacggccccatcacctatgctgcgaaacgtttggttgcagagaagcgttgcccgattttcaaacgccgctcgttcttccacgggtatcgtgatgtgatgactcagtccgtgggcaacgccgcactggacctatatgaatatctgcgggaccataccgactatgatgtggacctgatctggcagaacgcgcttcgtacgatgaacgtcgccgatttgatgaagaacctgcaccttgattatgtgctgtcgcagtcgctgagcgttcctctgccggaaggcaagaaaatagcgctcgctattcatgtctattacatggatctactggagtctacgttccgctatatccagtcgatgcccgaaggctgtgacatcatcatcacggttggatccgaggcgaatgcagaaatcgtgcgtgaatactgcaagcagttcccgtatcgcttcgatgtcagggtgattgagaacagaggccgtgacgtcagctccttgctggttggttgtggggaggacctgttccaatatgattacgtctgcttcgcccatgacaagaaggtcacgcagctgtctcctcagagcatcggtgacgggttcgcgtataaatgttatgagaatatccttgctagcaaggagtatgtctccaacgttatcgatttgttcgagaagaatccgcgtctcggcatcgctatgccgactccgccgaaccatgcaagctatttcccgggatacacgttcccatgggggccgaattttcccgggactaaggacttcctagaacaaacgctgaacatgcatgttccactgaatgccaacaaggagccggtggctccgatgggtaccatgttctggttccgcccggaggcatttcgtggcttgctggatcatggatggaaatatgaggacttcccgccggagcctaacaaggtagatggcacgttgttgcatttcatcgagcgtgcttatgggtatgtaccgcaggccaatggatattatccggcgtttattttctctgatcgttatgcgcgtatcgagatcacgaatctgtcatacgagctgcgagaagtggtgaaggtcattaccgtgccatggattcgtgaggacttgcagcagacctgcgtcgccattgctgagggcaagcgattccgtaacacattactgcgagtgataagaaatattatcaaaaatgttccggtgataggaccggcactggtgaagttgcatcgcaaacaattgggtataaatgaggatgagtaacatggcggataatgtcacgaaacgcaagccgaggctgttctacctggactgggtgcgcggactgtctgcgatactgattgtcatcacgcatttcaataatccatatctagtggaacacccgatttttgcgaactctccgttcggcatttacatcggttcgctcggtgtctcccagttcctcattatttctggcgctgcattgatgtattcgcatgaggatgcagagaagctggatctgaaggagttctattggaaacgatgcaagtcaatctttccaatgttctggattgctttcatcatagctaatgtgtatttgttcttgcgccaaggcggcatcgtcgcggcacaagccccaaaatacagtgtgctgctctctgtgattggaatggatggatacctgtctaatgccggaataccgacattttatacgcttggtgaatggtttctgggttttattctactgttctatgctgtatttcctctgttgaggtatggagtaaagcatcatccctggatcactggcattatcatcgccgtgttgtatatgctgacagtcgtattgcgtccgaacttgcacggcatgccatctgatatattgctgaccacccggttgcctgaacttgctttcggcatgtattttgtccgctttatcaagaaagtgcctcatgtagtgggcgcggctgcagtggtacttctcgcggtacagcagttcgctgatatcttgaagggaaatgtggcggtcacattggtgggtgtggtcttcttcctgttcctggtgtggatctcgcagtggtttgaccatcagcccattcgagtggttataggctcactatcgaagtattcctatgcgattttcttggttcatcatcaggtcattatgcaggtctacaccattgtcaatcccagcagtctgggcatgtccaatgcttatctgctatttgcggcggatatgctcatcatcgtggtcttgtcttgggtgctcttacgtgtgactaatgcaacagtggcatatgtatcgcggatgctccaaaaggttgagagatagcccaatgagtggttgctgatggcagatatggattggggcgggttccatcgcaatggagcccgccccaatccatatattggttgatttatcgtgccgcaagaatctcgtgaatcttggtggcatcaccccatacaccaggagaatcgtagggacgatcggggaacgctccataatccagtgtgatgttgagattattgtctttgatatattgctcgacacgctcagccaaagatatggggttcccggtgcagcagttgataatgccggttacctcttgttgagagaccgctgcgcttatttgccgtgcaagttcgtcgacatcgatgaagtcgtacttatttttacccgtcgtgaaggggaaggaaggcttgccatcatgtgcggcttgcagcaatttggagaagatagagctgccgcgtagatcgtccccgacaatgtaatatgcgcggagccattgtgcggtcgcattatgctcttgtgcgagcatgagcgtagcctcacgcagggcatttttcgcgataccatacatggaagctgggtgacaaggggtgtgctcatcaatagcaccttcccaatatccgacttcatgcatagttcccataacggcgatttgaggaagacctccatccagcatgttcttgatgagccggtaatgggaggacaaatcacccatatgattatcggagttgtgtttaaaaccgtcgcgccaagccatgtgcaggcaaacatccggttttccaagcgtggaataaatattgctgtcagactcgaatagattggtttctatgtgttccgcacgactgtcaacatcgttgagtcgaagatcagaggcgataacatcctgtccattatcaagcagtgctttaacgacgtgcctaccaatgtaaccgccggctccagtgacgagaattctttttgccatatctacagagtgtaccagcagagcatatgaagcgagtctgtaccagacactgactagcattttttcacaaaggcaggggtgcggacgaagagttggacgtttgggcgcccggattggagcccgcatgttttcgagggaggattggcgcagggccgttgacctgcatttcatggagggcatgaccatcaggaaggtcgtcaccgagctcggctacccgtccgagggggcgctggcgaaatgggttcgcgaggacccgcgctacacgggcgcatgcaggcgttcgtatacgctggagtgcaagacgaacgcggccagacgcgcgctgggcggcgagcctctcgcccgcgtggcgcacgacacgggttgcacgctgacgagcatgtaccagtggatgcgccgctaccggagcgaggggatactgggactgatgaacggaagaaacgcgccggctccggccggaccggtgcccacggccggtgatgacgtggaggagctgcgccggcaggtggaggccctgcggctggagaacgcggtgatgcgggagacgatcattgtttgtttgtgttcaatgtgatgtgagccgagttaccgcgatggtgttggccgggttaccggcaagaagttgaccgttttatcgccccttggcgcaaaagggcgtcggcccgtttcgtccctattagattccctggttggtagtggttttcccaggggaggaaaggaataatatgacggtgtcgacgcccgtgcaacaacatatcaggattctcgacgcgcagggtgtttcctggcgtcggacagccaaggaggtcggagtgtcaaggcagacggccgggaagtacgccgaattggaggattgctcgcccaagccgcccgaacacgcgaaggcgaagtcgaagctggacccgttcaagccggtgatcgacaagtggttggagtcggaccggttgatgccgcgcaagcagcgccataccgcgatgcgggtccggcaccggctgcgggacgagcatggctacgagggctcgtaccagctcgtgcagcgctatgtgcagcagcggaagcgggattggagggatccgggcgacggtttcatggaactgcgatgggagccgggcatcgcgcaggtcgatttcggcgaaggcctggcctgcatcaagggagctcgggtgaaggtgcattgcctggtggtggcgttcccgtattcgaacatgcgctgggtggtcgcgctgcccggggagaacgccgaatgcgtgtgcgagggtttggagaccgtgttcgggcatatcggcctggcgccgcgcgtgctggtgttcggcaacgccaccggcgccgcgcaccgggtcgcgtgagacagaatcaccatcgtggacgtgttccaacggttcgtcgagcattaccgggtcgaggtcaggttctgcaacccggccagcgggtgggagaagggcaacgtggagaacgcggtcgggttcctcaggcgcaacctcatggtccccatgcccaacgcggaatcgtaccggaaactcacctcctggatgctctcgcgctgcgacgagatcgccgggaacacgcattaccgcaaggatgttccgatctcggacctgttcgccggggagaagacgcgcatgctgccgttgccccgggtcccgtacgacgcgtgccgttgggtgacgcgcagggccgaccgggagggcaacgtcgagatcgattccaaccgctacctcgccggcccctcgtggcgcggatggaccctggaggtcggtttgcgcgcgttccaggtggagatccgcacccaggacggccggttcgtggccaagctgccgcgcgcgtacggcagggccgcccagacggtgaggaacccggcgagcctgctgcccgctttggcgcgcaagtcgcgcgcgtggggcgaatcccccatccgcggcgatttccccgaaaagctccgtctcgcgatcgacgccatggactccaagacccgccagcgcacgttccgcctcctggccaaggccggcgacgcatacggcttcgatgccgcggcaaaggccggcgagcacatcgtggagcagggccactcgatcgacgaggcaagcctgacggccatggccagacgcatcagcgcaggcgaaaccccggacgacgtcccggcaccggacctgcacgcgtacgacaggttcatgcgccccgaaccccaggcgaaggcggcatgagcatgggcaaaaggaacacaacgatgccggacgcgacccgccgccgcgcgtccacgaacaggaaagtgtgtttatgttcaatgtttttccaacaggttcggcagcgttttctcgcagtgtaggcagctggtttcccacatgatcggcaggatgtcccctcatggaaaggggcaccggcccgcctcgcctgttatattcccgagttgcggaacaacggctcatccgccggttgcagccggcgggactcgggaaggaaaggatattgacgataccgatgcccaaacagcaagatatcaggaggcttgacaggcagggcgtgccccatgccgagatagcgcgcaggctgcacgtggaccgttccacggtcgcgaggtacgcgcgcatggaggactgcacccccaagccgccggtggaccgcagatacggttcgaagatcgacccgtacgcgcatctggtggacgggtggctggagtccgaccggctgatgccccgcaagcagcggcacaccgcgcgcaggatccacgaccgtctgctgtccgagacggactacgacggggagtactccacgacccaacggtacgtgaggcggtggaggcaggccaaccaggcgccttcggacggatactgcgaactggagtgggcgcccgggaccgcgcaggtcgatttcggggtggcgcgggccaggatcgcgggcgaatgggtcgaggaccactgcctggtggtcacgttcccccactcgaacatgcggtacgtggcgagcatgcccggggagaacgcggaatgcctgtgccacgggctgctcctggtgttcgggcacgtcggcggcgtgccgcccgtgctcgtgctcgacaacgccaccggagcgggacaccgcgacgcgaaggggcatgtgacgctcaccaaggtgttcgacgcgttcctttcccgccacaggatcgaggccaggttctgcaacccgtattccggcagcgagaagggcagtgtggagaacgcggtcgggttcctgcgccgcaacctcatggtcccgcccctggaggccgagtcccacgggcagctcacccgcgtcatgctcgaacgctgcgacgggctggcccgcgcgaggcgccaccaccggtcggcggacacgtccatcatggaacgcttcgccgcggaccgagacgcgctgatgcccctgccgtccacgcgtttcgacccgatccggtgggagatccggaaggccgacaaatacggccggatcgacatcgactccaaccggtacctggccgggggcggatggcatggcaggcgactcctggccgcggtcaggtgggacagcgtgcggatcgccgaccccgaatccggcgagacggtcgccgaataccccagacggtacgggaagacggccggcacgctgagggatcctgcgctggtgatgccgatgctcgccgcgcgcccgggctcgtggagggagacccccatacgtccggacttcccggaggacgtgcgcgaatggctcgaccgggccgacggccggcgcctgcgcgacagcctcagggtcatcgcccaggccaccctggccgcgggcttcgacaacgccatgctcgccgcgtccgattcgatcgggctgcggcccgaggccgggcccgcggaaacagacctggtgtcgctcgccctgcgccaccgggacggggaaccggacggaacggacgcccaagggcccgacctgctggactacgaccggtgcatcaacggggacgggccggacgacggggaggagggacgatgagcgggggcgccgatcccaggatcccggagaccaggaggcgccgggtcgaaaccatcgccaaaagcgaacgcgtcatgacgatgagcaggagcctgacgctcacgcgcagcgtcctggccgagcatatcgcccgggccacgcccgcccagctcgacttcgtcgagtcctggttcgaggccgagctcgccagccgcgagcaatccaaaagggcccgcctgctcaaagccgcggggctgcccaacgcgaagaccctcgacggctacgactggtcgaacctcaggatgcctccggactgggggcgggcccagctcgaggccctcgagttcgtcgacggacgcgaggacctcgtgctccacggcccggtcggcaccggcaagagccatctcgccgtcgccccgggaaggctcgcatgcatgaacgcagtgcccgtcaggttcttcaccgcgtccggcctgctcatgcgcctgaggcgcgccaaacaggagaaccggctcgacagggagctcgcgggcatcgggaaggcgcggctcctgatcatcgacgagttcggctacatgcccgtcgacgaggaaggcagccggctcctgttccaggtcatatccgattcctacgagacaaggagcatcatccacgccaccaacatcgagtccggcggatggggccgcgtcctgggcgacaagaacatggccgccgcgctcatcgaccgcaccgtccaccacggcaggctcatccgtttcgagggcagatcctaccgcagcgagcacgccctcatgaccagataaaccaaccaacgacaggcaggaacaggcggcgggccggccacatgccgaacatgcggaaaacccgctgccgaaaccgcggaaaaacactgctcataatgcggacgtcaacttgccaaaacacaaaagtggacgagatcatgcgtctggcccgccggctgccattgaccaggcaggtgctcgccgaccagctcgaaaccgcgaccccggcccagatggagttcgtggaccggtggatgaacgccgagatcgaatccagggaggcgtccaaacgcacgcgcctgcccggacaggccggcttccccgccgccaaggaactcgacgactacgactgggagaacgtgcgcatgccggcggactggcagcgcagcgggctcgaatccctcggattcctcgacggtccggaggacgtggtcatgttcgggcctcccggcaccggcaagacccacctcgccatcgcgttgggcaggaaggcctgccggcagggcgtgccggtgcggttctacaccgccgcgggcctggtcatgaggctcctgcgcgccaacacggaaggcaaactcgaccgggaaccgcaagccatcgccaaggcccgcatgatcgtcatcgacgagctcggcgacgtgcccatcgacgaggaaggcagcagactcctgttccaggtcgttaccaacgcgtacgagacccagagcatcgtctacaccaccaacatcgagtccggcggatggggcagggtgttcggcgaccccaacatggccgccgcgatcatcgatcgcaccgtccaccacggcaggatgatcagattcgagggcgaatcccacagacggacccacgccctcatgcaataacaaaacaaccaaaaccagacgaaaccagccgacggtaacccggtaaacaattgaccggtaacccggacagccacccacggtagaacggcacaccagcgcttgacaaacacattgttttaaaagccgacgacccgcgcctcggcccgtccatgctgacgaacggggagaggacgcgggtcgtcgacgcgatcaggggtgaattcggcctggcgacctgtctggatgccgtggggctgaaacgcagcacctactattacgagcgcggcacgatcgccgcgggcgacaggtacgccgtgctgcgggcccgcgtcgcgagcctgttcgaggatggcgggcgcgtatggggctaccggaccatccaccgcatgctgcgtctcgacgagacggacccgctcgtcgtctcggagaaggtggtgcgccggatcatgcgtgaggagggactgcggccagtgtacctgagacgcccgaagcggtggagctcctatgagggggggggaggagagagatcggcgaggccccggcgaacatcgtggagcgggacttccacgccgacgcgccgaacgcgctgtgggtcacggacgtcacccagttcactatggacgggtataagtgctggctttccccggtggtcgactgcttcgacgggatggtcgtctcctggaccttgtcgcgctccccgaacgccgacatggcgaatcggatgctccttgacgcggtcgccacgctcagggatggggaacatccaatcatccattccgaccgcggctgccactaccggtgggacgaatggattcgcatctgcgaggaacacgggctaatccggtcgatgagcgtcaagggatgcagcccggacaacgcagccgccgaggggttcttcggcaggctcaagaacgagttcttctacgggcgggactggagtggcgtgggctacgaggagttccgcgaacgcttatccgcctacctgacccactacaatgagactaggattaagaagtcactggactggatgagccccgtgcaataccgcaaacaccttggactggccgcctgaccgtccaaaaaacatccgcactctcttatccgtatctggatattgtagtaaaaagcccaagataaagttatgcaaatgttacggctgtaaccaatgcggtaggttatgggcgttggacagaaatgcagaacgctaggaggcgcatgtgcgcactcaaagagattttctgcggcgctttcctatttcatatttttaatcttggcgtcgtagacatatttttcgagaaggcgaatctgccgggttgcggcacagcgaatgcgttgtgcggggctgagcttgctgatgagttcattgagttcagccttgtccttctcatgctgttgttggcttgcaggttcgcggaagtctggggcggtggtttcctcgtggaaggctccgacgagcgtgtagtagctacggcccgggcgcactccctgttccaagcacaggcggaagttcgcggctcctgcggcaaagttgtcgtggtagaagctgaagctacgttccttgtgcgtcactgagccggcagattgcagccaattgtagagatttacgttgagatcggccaccttgcgcatacgagtgtacaggtcgccagccaccatcacgtcctgcgcatacatgccctctgggaatcgaatcccatcccacagctcgcgcttgtacagccggcaccagtttgcctcgttgaaatagcgggcttcggtattgcggccgagtttatctccgatcaggcgcaggcttttgcagaacacggtctggtatgcggcgagtgggtgctcgaacacggtgattgtgccgggagcttcggcgccgatttgagattcctgagccacttcgtccaactgggagactccgaactgacgccaacgcgccttgctcatatccgctccggagttttgcaatgcgtgcagcagatattcaatattgcagcggtcgaggatgtcgtcattgtcggcaaacgcgatgtattcgccacgtgcggcgtctagtccagcgttctgggctttggcaatgccgccgttctcctgatgaatcacagtgatgcggctatcctgcgcagcgtactcatcgcagattgcggggctggagtcattggccccatcgtccaccagaatcacctcaaggttcgtgtatgactgctgcagaatcgaatcaatgcagtaacgcaggtagtcctcggcattgtacaccggcacgatgatggagatgaggggatcggagtttggcaaggttcggtgtttcctttttcgattattctatgtggacatatccagtatgacatgtttcttgatattgtttgccggaatcatcgttcaattgtgagtgaatcacgaaaggctactgaccgtgatatgcgccttgaggaactcgtcggtggtgaacaatccggaatagtcaccggactgaatctggctgatcagcgattcgtaatcaacggtgtctccggtttgcagctcggtgacgtcctctgcgtcttcggcagatatagaggagggagcggtgacggtgacgaatgcccatcgtgtggcccacagttgcacgggcgtatcgccgatctgatatcgctcgataagactgttaccgatatctcccgcattggtgtcgctggagactttgaacgtgcacagcgagtagtttggacgatccttgtctgtgacggtaatcgtgctgtcgtctacagaggtgctgacttcgttatgccaggaatagggcaacgtgacgcggtaggagtcggtttgcgcgctgagtgatgccgtgaccttgtcgctgtattgccagacgatgtcgatggtgttgctgctttgccgctgaatccggtcgtaatcgcctactgacgtctttgtccaggaatcggtgagcttagtggtgtctgggatgtcgagttcatcggccatgcacgaacgctgtgttgcgccatccatttgccccttggaggcatgcagccatactttgctgtgattggtggagcgtttccacgcgaatgcattaggggcgggattgttttgcggcgcacatttcagccacgcctgatccagctcgccatccagatcagtgggcgaggaatatgcctcagtccaatcgccttgggtcgggtcggcgacggcggtttgtgccgagctggaatccgacttgtattgctgattctgagataacgtctgaagtggcttggtttttgatgctcctatacattgtcaaatgtgttggagtgttggctttgcccgaggattgagtccatccactcgatgatttgtcgttcgagttcgggcagatcccgaaccccacgttcgatctcgctgacgcggctggacggcacgcccaacgcgtcgccgacctgttgctgggttttgccgagcgagacgcgcacttccctcagcctggccccgcgttcgacggcgggttcgcgtccggcttcgccgttgcggatcgcgatgagcgcccggtaggcctcgcgggcgatgtagcgcttgagacaccgcatgatctcgagtttgccctttccctccttggttttccttaccacgtagtccttggtgggttggtggtggctcatgcgcaccagggcgacgttatacagggcccggttgccctgacggttaccggatctgttcaaccggtgccggttggtcttgccgctggatgcaggcagcgggcaggcgccgcagagcttggcgaacgccgcctcggagcggattcgttccgggttgtcgccgccgatgacggccagttgggccgccgacatggtgcccatgcagtacacgtcgagcaggggacgcgcgttctcttccagaatctggcgcatgcggcactccagcacatcggccctgtcgtgcagttcgcgccatgacgacgccagcgtcttcagcgatgagagcacgttccgctcgacgatgccaccggagggacggcaggccgcgagcttgccgatccgtctcttggacggcagcgaccggtacctctccctgattccttccggagcggtggtgagcaacccggcaagacagttcgatatggccgtcatggaggtgacgagctgctcgcgtgcagcgatcaggtggcgcaacgcctcgcaccaaccgtcggatgccttgggcgtgctgatcccatcgccggcgagcacgcttctggcggcggctatggcgtcgatgggatcggacttgccgtcgctgcggcgcacgctgcgtttcggccgcagcacctcgtgcacggtgtagccggctgcggcgagcctgcgcgagagcgcggcaccgtacgagttggtgccctcgacgcccacgcccaggcacagggccgggtcacctatcatggcgatcagccgttcgtagcccttcgggtccgcattgaaggtctcggtgtcggtcacccgcccgtgttcgtcgagcagggccagtgtgtgggttgttgaatgcgtatccactccggcgaggatcgttggtatagtcgacttcatcgtcggtcctttcatgcgtttgtcgcgatgccgttgccgatggcttccggcacagacagaacgttgacggggcacgctaccatggtcttgctgggaaccgatggagcaaccacgctcctatgaggtcatgttccatggccatcgggtcggtgggcggcgcgggacaaatcaaaaacaggacaggttccaaggaatcgtcagttccgcccggggtcaccgcaccgtccatcatccttcattatcgccggtcagctaaaccggcataaccattatcaacgttccgcctttatagtgaggcggcttgcgacgcttgattcgtataatactcggtttccaccgcttccggtgtcccgtagcccaggggccggtgcagccgtttcgagttccgccacgagacccgccggaacgtcgccggccccaggtccttcggatcatggaagggcttgcgccgccagacgagaccggtcctgtacgcgccgtcggcggattcggccatggcgttgtcgcgggagtcgccgaccgtgccggtcgacggcagcatgccgtattccatcaccctggcggcgtacaccgtgccggtgtaccgcacgccatgatcgccgtggcgggcgagaccgtcggtcccgcccgcgcgacgcggcccacgcgatcgcctgctccaacgcctgcaggggcggctcctccgtgttcatggtggtggcgcacgcccggcccacgatccgcctggcgaacatgtcggtgacggatgcggtatacgcggagcgcccgtcggccatgcgcccgtaggtgatgccggccacgtgcggccggtccggcgcctcggcctcgaacttgcggtccaccaggtcgggcctgccgcccgtgcccttcgcgggcttggtggcgacggagcgtctttccacgcctgacgccccgcatgccgagcccgcgcatgatgtccatcacctggtcgcggcccgcttccccgggatcccgacccttgccgacgagcccatgccgcacctcgcggcatccgtacacggcggagaacccgccggcatggatgtccatgacgtcgcgggccagcgcctcgtggcgcgcccgcatgcggctgacgggccctggcctgaacatgcggtagccgcgcggcgtgaggaaaccgcagtccagcgcttcggacaggaccttgcgatcggcccggccttgaaacggttcccgtattcgtcgatgcacgcggccatcaacgccgtgtcgggtcgagcccggccgcgaagaaagccggagccgtcgtcgatatctctttcgcccggcgcaattccgtgttctccgcccgcagccgcttcagctccgccatcgcctcctgcgcggaccgcttcgtctccgacgaatacgacgacctggactccgccagcaacctgacggccttcgcccggaactccggagtgtatcgagtgccctttgccatggttccatcatctcccatcgagttagaggaaaagcggaacaaaatcaggtcatatcaactacctcgacacggtcgccgaggaactcaacgaccggccacgcaaaaccctcggcttcatgaaaccaagcgagaagatcatcgaactactcgacaccagcaactaacctaaaaccaacaaaacaacacaggcgttgcaaccaccactagaatccaccaattacgggttgaaattgtcgttctgggcaattccccgtgcaaaaatgtcgctttcgggcccgaaagcggcgatttcgcacggggaatcacggatttcggctatttcaacccgtaagttgcatcatatgagcgccttgatcagccaaccgtggcggccgtcgtcgtagagttcgtcggtgagttgatatccacgccgctcgtagaacttgtagtggtcgttctccgaatgtaccgcggcgatggttcctccactgtgcgcaatacggcgttcggcgtcggccagcagttgggagccgataccgcggccttgcgcgtcgggcagcacggcgagacgcgcgatcacgtaccttcccggctgatcggaatggtcgggatccgcatagaatcggcatgtcgccacggtccgattcccgtcgaacgccagcagatgaacggccacggcatcccactcgtcgaattcaggccgccagtcacgctcgcggatgaacacctgctcgcgtatcgcacgagccgtttcaagcagatggtcgtaggcttcgattttaccggtcatgggcgccagtgtagcgcgtgtcatacgtggtgccgcgcccggcatcgcgtggacgcctaccgtcacagccggccggcccactcccggagcagatgaatcaccgcttcgggctggtcgatgtgcgcgttgtggccggcatcatccagcgtgacgaacgtggcgtcgggataatgcgacaacagggcccgttgatcttcaaaaccaacgatctgatcccgtcgtccggtgacgaacagggtcggcccggcataagtgccgaatacgcgctccgggtcgtcattcagccaataacgggcgtccaatctggcgcaggcgtcacggtcgcacagacggatgcccggcaaaatatatgactgatagcggcgccacgcggcgaatgactggttgacgcccatggttacgaaatcgaacgtctgatcctgaggcagcgcgtgtatcagcgtcggattcggctcggtgatcacatgctcggcgacatgacgacgagtgcgccgcggatccaccaccggggcgatcaatgccagcccgcgaacccgcgatgactcgcgagccaccatctcacgggcgagtgcaccgcccatcgaattgccgaccagcgcgaacggctcccccgcgccgaccagatcgtcgatggcggactgcagccagtcggccatctccggcagaccgcacgcgcgtgccggcagtgccggagtgcggccgaaccccggcaaatccagatatatgcgcttcagcgaccgcgacgcggcagcgcccgactccgggcacaagaatgcctcatccagcagcatcagcgaacggtggtccacgcccatgccatgcacgaacaccacgggcaacccgtcaccctcggtcactgcatatgcctgcggttgagtcatcacacggtcctttccaccggtatcatccgtcgcgcttcgcggcgcaacgctttacgataccgtcgccgtgcgatgtttcaccgaacgccggtgccggcacacaagccgccgccggcacagttcagccgcggcgggcgagttgcacggcggtgccggatgcggtgaccatcagcatgccgttgtcggcgccaagcacctcgtagtcgatgtccacaccgaccacggcgtgcgcacccattgcctcggcccgctgctgcatctcaagaatcgcctcgttgcgcgccctcatcagctcctcttcatagccctgactgcgtccgccgaacatgttgcgcaggccggcgccgatatccttgaacatgttgacgccggaaatcacttcaccgaacacgatgccctgatagctattgatgacgtaaccgtcgaccgacggcgtggtggtgacgagaatcatgatatgaccgcctttggtttgactgcgattgacatcttcagtctagcgccgagcaggtgaatcgtcccgtcctgtaggtgggcaggacgggaattgatatagggatgttttttcgaggaccggcgcaaactggccggcgggagcggtaccgtcccgtcctggcgcaccgagttcggcgagcccatcaagcactgcgatggaggccggatcgtcggagccatcatcaacgacgatgacgcaatcgggacgaatcgtctgggcgagcgcagattcgactgcttcacggatgagcgctccctgattgcagctggtgatcaccaccgtgacggcagagggcgcggcgggcttcaatgctgcttccataatcgcaattccaacaagcgaggcgagagtagagtggaagcgcgagatatccagcgacagacaggatcagtcatgatcagcgcagacgccatcacatcgagaacgttcaccacagtgcggttcaaggaagggtatagcgccagagaggtcgacgacttccttgacgaaatcgtcgaccgcatggcgaccggcgaccactcgctcgcaaggcgcatcaaggagaagaccttcagcaatgtgcgtttcagagggggatacgacatcgacgaagtcgacgattttctcgatgaggtggccagaggactggaaggtgacgcgggcgcgagcacgggcgcgagcacagccagcgcagccgcagcgattccggatccgcatgagaccgtcgcaccggagccgggcacgagctacacgagcgacgcgaatcttgcggccccttcgtccgacagcgacgcggcgcagctgtcatggtgacggttgtgctggcgtctcgctgaaggatcgcgggcagccgacctccaaccgcggcgccgcggtcatacttgctggtggtggtatttgccgagcggtttgtgtcaaactttcagtagctgaaacttccgacagcaattgcaatcacttcacatgccgctcatgacacccgtccgcacaatcgcattatcaaacgccgccgttgtatcctgggtaaccatggactctcatgccaagatcatcaacgttgtgggtgcggcgatcgtacgcgatggagcggtgttatgcgcgcaacgcggaccgggaaaatctctcgccggatattgggaattccccggcgggaaaatagagccttacgagacggctcgtcaggcattgcatcgggagatcgaagaagaactgctctgtgagatcaaggtcgccgatgaggtgtgcaccagcgagtacgcctacgacttcggcacggtccgactcatcacattcatttgtcacctaatcgacggcatgccacggctgaccgagcacacggacatccgttggctggatccttccgcaatgccacagctgaattgggctccggtcgaccgtacggccgtcggcatcatcgcaggcatgcgcttcctcacccagacaacgtcgggcacctccgaggaaccgagccggccatgaatacgcgagaatcactcaacccgcagtcagacctcaaaaccgatgccacgcattccgtgctggaaagcgtcatctccggactgatcgaaccccggcaggacgcccccgaaagctataagccaacgctgatttcgaaccgcccaggcgacctcaccatgcatgatgaaatcagcgatgcgctcacgaacagcgattccttcgacatctccgtcgccttcgtctctcctgatgccatactcagtttgttcgaggacttccgcagtcatcatgccaatgcgcccgatcaggtcagcagactgatcacgtcgacgaagaatcatttcaacgacccacgcgctttctgggaactgcttcacctacagcggacggcaggcgtggacgtccgcgtgtgggcaggctccgactcttcagtatcagtcgctcaagggcagccgttccatcccaaaggatacgtattctcgcgccgcatgcgcaacggcaccccgtactacgacctgttcgtcggcagttcgaatcttaccggcgccgcattgaacactcaacgcgaatggaatctcaaggtctcatccctcgccaatggcgaactggtcgcgcaggtgcgagatgaaatcgactcacagatcgccgattccaagccgctcaccgaggaatggatcaaacagtatgaggaggatttcaagaagtacgcgccgccacggcgcgacattctgaagtccctcgaaggccgtgagatccagccgaacgccatgcagaaagaagccctcgcgagcctgaagaaactacgcgagcaaggggagcatcgcgcgatcatcgtgtcggccacgggaacaggcaaaacctatctttccgcattcgacgtgcgtgagtaccggccccggcgcatgctgtacatcgcccagcagcaaatgatcctcaaagcggcgatgaaatcctaccaaaaagtgctcggttgtccgcaatccgagctgggactgtataccggcaccagcaaacaacaggatcggcgttacgtgttcgccacggtgcagaccatgcgtcagccggaggtactggcgcaattcgcctctgacgagttcgactacgttcttgtcgacgaagttcatcatgcgggcgccgaagggtatcagcgcgtcatcgaccatttcagggatgccgacttcatgctgggcatgaccgccacaccggaacgcaccgatggcatcaacatcttcgagttgttcggccacaacatcgcctatgagatccggctgcagaaggctctggacgaaaacatgctctgcccgttccattattacggcgtcgcagaatatctcggttccgacgaggacccggaccaggacatgcaccgcctcgatgtttcacaggggctcgacgcgaaggagtcgaaacagctcaaatacgagatcgggcagctcgccaccgagcagcgcgtgcgctatatcatcgacaagctgcaggaatacgggcaattcgggatccccgtcaccgggctggtgttctgcagcaggcaggaggaggcgcacgagctgtcccgcttgttcaacgagcattggaaccagcaagcggaacgcccctatcgcacggcagcggtgaccagcaaagacgtcaacggcaagccgttatcgcaggaaaaacgcgacgaatacgtccggcagctcaccgacggcgaactcgactacctgttcaccgtcgacatgttcaacgagggcgtcgatatccccgccgtcaaccagatcgtgatgctgcgcagcacagagtccagcatcatattcacccagcagcttggccgcggactgcgcaagttcccgtacaaggacagcgtcgtggtcatcgatttcatcggcaactacaacaacaactacctgatccccgtggccctgtacggcaacaccggtgaccgcgaccgcgcgcgcaagaacctgcagcgcaaatcgatcgggttgtcctccataagcttcgacccgatcgccaaggaacgcgtgctggaatcactggacaccgccgactggtccgaaatgaagaagctatcggaacaataccggcaggtgcgatacgagctcggacgcattccgatgctcatggatatctacgcctacgatccttccttgccgtatacattggccacgaagcgcagcaactacctcgatttcgtgcgatcgcgcgagaagagcctcggcggcggcaagaaccacgagacaacatttgaggatcagctggacccggtaaccgacaccgaagacgcggtcctcaagatggccacggaattgctgctgcccgggctgcgccctcatgagttggccatcctcgaacggctgtgtcggcttgccgaagagcgcctggatgacgagactcctgtcagctggaacgcatccgcgccaatcagtcgagatgcgctgcttgatgcgatccgtgcggacttcccacaggctgatctctcggatgcgcagttcgactccgctatcagcgtgcttgactactcatacttcaccggaccgaatcgcaaacgtttcgggaacctgccactggtggagacgctggccgacgatgatcagggcgaaccggcctatcgtttaagctccggcttcgtcaacatgctcgccgaaaatcgcacgttccgcatctttctcgcagacacgctgcgcaccggtctggccaattgccgagacctgttccaggaggcgcagagccggcgacgcgctttcgaccatgcattcctgtatgagcgcaaatactccatggccgacgtcatgcggctgtgcggatggaagaaggagaacacgcctcagaacgtaggcgggtacctgctcgacaaagacaccaacaccatgcccatcttcgtgaagtacgcggccagccaatacgaagacgagttcctgaacgcacaggagatgaagtacttcagcaagaacgggcgcaccccgcaatctcccgaattccagtgggcgctgagcggtgtgggaccggactggggccgtacgcatttcgttccgctgttcgtcatgcgcaaggcggaagaggccgacggcaaatactattacgtcgggcacgtcgccgtgtttgacaatccgacgctcaccaccaagccgaacacggccggagacggtacggtgaaggtcacgctctccacactgagacttgcgcggccgctggatcctgagctgtaccggcaccttgtcgggtaagagattgcgcagatgagcgctgtcagaaggctatctgcgtttcgagggggcgattcggtttgatccgaacatctatctgcgtttcgaggggttggtggccaagtataaacgcccccaaaaccgcatgattccaatggcgattggcgctcaataccccgggcatcgcgttttggcaacccctcgaaacgtagatagacgtttggcgaacacgaaatcaaccccctgaaacgcagatagctgccccttcccgcgaaaagtctgcccgttcgtatgaggtttggcggcgattcgcggcaaccgtgccttcacaatgtgcgatatacctgattcgccttcgaaggagccgacgatgagagaatctacgctcatcaccaagagcagcatccgacgcgcgtcgccacagctgcgcctgcgcacaggattggcgtggggcatcgcagtggcagtggacgcttggctagtatggctcaaatggtggtgcctgccgaacaccatccgcgaaatcatcagaatgttccccgaagccgcatttctgcatgatccggcgatgctgtggcaattcgtcgctgcatcatgcctgcaagtcgtcgttatcgcatcgttgtatctcaccgtcgcaagaatcccggcgcgctgagtgccatggctgcgtatcgcgacgctcgccgcgttcgcggcgatctgcatcggttccaacgccctggtgatcgcccacggcttcggcactccgggattcgtgtattctctgggattggctacggcggccagtctcatcgcgaccgttgcgctagtccatggccaatggcggcgatggctggcgcggaggaaaaggcgcgcaacggctctctgaacggctattcgccatccaccgcaggcaaccagtcgccgtagccttccgcctccatgcgcgagcgcggcacgaagcgcagcgcggcggagttcatgcagtaccgcaaaccgccccgattggctggcccatcgtcaaacacgtgcccgaggtggatctgcgtgtcggccgtccgcacctcgatgcggtcgcgccccgggatgcgatgatccgcgtgctcggtcaacagctcgtccgcgatcggcttggagaacgccggccaaccgcagccggaatcgaatttgtcgcgcgatgagaacaacggctcgccgctgaccacatccacgtagatgcccggctcgaactcctcgtcgtaggcgttgacgaacggccgctcggtggccgcgcactgcgtgaccgcgaactgttcgagcgtcaggtcccagatcttttccacatacttctgccgccgtttcacgttcgcgatggcggccagcggaatatggcagaagcctcccggattggcgatcagataatcctgatggtgcgcctcggccgggtagaagctgcgcagcggctcgaccaagaccgccgggcgggcgggctgccgatcaaccagctgctccagcgcggcgatatacacggattgctgcgtcgcgtccgtgaagaacatgccagtgcggtactgccgcccactgtcctcgccctgacggtccaccgagaacgggtcaatgacctccaagaacagcagcgtgagcgttcgcagcgtcacctgcgctgggtcgaacacaactttcacggtctccgcggcgtcggtgacgcccgcacacacctgctcataggagggtgattcgaccttcgactgcgcgtaaccgaccgtggtgtcggtgacaccgtcgacgttctggaagtagcgttccagcccccaaaagcatccgcccgcgaaataggccgtctgcatggacgggccgtccgccgcggccgggttgcgccgggagttgtttgttgtatcgtgattgttctgctcgctcatgcgtctcaccatacctgatttttctttgcgttgcgttcactcacagcaccgtcgattggcggcgtttcgctcgtctgtaggccagccgccgatgtcaccgctcagatgcgcgtgctgcgctttacgactttggtcgcgtatagggaaaggatcacggcgatcagaagcgaaaaccacgcctcccagccggatgtggtcgcccgcgcggcgagcagaccgataagcgtggtcaccacggaaagccacatcagtgccatgaacggccgggatttggacgtgtccgctccggcccggcggccgagccatccgccgatcagatacagcacgcaattgcccgcgaacaccaggccgagcgtgaaccatgccacgcgcaggccgatgcgccacccgccgatcacttgcacggaagccgcgggatcaaggccggacagtgacgcgagcgcactgatcgccatcagcagctggacgaccgcgtagaccatgacgatccgtcctacggtggtcagcgtgctgtctccgcgtgtgaaacgggaggattcggtggactcggaggatgattcggctggggtcttcgctgccggctgattcgagacgtcattcacgtttccatcatagccttcgcggagaaccgcgtccgcgcctcatgtgccgcggttgcatcgcacccggatcatccgccgtcatcctattttctcgacggttccaccccactgcttctggagcttgtcaatgatggtcctgtagctgaacaccgaccatttcttgccactcaacagccgccagtctcccttggagacggtgctgttcgcttgctcgtcaaacatctcggcgattttgtatcgcaaaggcgcgcggtacatgtcggcagcgaattcgttatcgaacgtgacgtaggcgatgcgcggcttgaggcatatctcgacgtccgtcacacccggatacccttgcgatgagagttccgaccagccggactcgcagtagatgccagcctcctcaactgattgttgcatgttctgcgcactctgagcaggtgacttgtcgggcgatgacggcttgacgatgccgtccttgaacaggttggagatcagcagcgcggctacggtcagcatgattgcgaatacgacggcgacgatggctccgcctgcggttccgcgcacgctcactcggttgccgcgtcgggaagccacgcgagccatgacgatcagtatgatggcgacgacgatcagcaccgccgcgccgattgccaggctgcgcacggataccgctgtcagcttcgcgattgcatggggtgcgacggcccgaaccagtgcgaggccgcccacgatgagcgcgattacggcgacaacagtggcgaggatccgcggaacgcgacccggatgcccctgcccggcctgataacgtcgccccgaaccggccttatacgatgactcatgcatggcagcccccgttctatgcatttggatgctcacctatcacactatccgcacatcccgcgacgcctggcctggcgggcgaaacgtggttttgcgttcttaagtgcgcgccaaaacgacgaccatgcgcacataggaacgcaaatcgccctgtttacgttcctatgtgcgcggacttgtcgtctcggcgcgcacttaagaacgcaaacagtcggtgaagcgcgtcgcacgcaagagagaccgtatgtcggcatgcgggccacgcgtgctagcgcacgaggaacaccatgacaatgatcatcacaaagccgacgaaatccgtgggcgtgaacaccgccccggcccacagcacggcggatatcgtcgcggcgatcggctcgctggtacccagcattgtgccgcgcatcgagccgatacgcatcacgccggccaggaacagccaatatgcgccgaacgtgcctccgacaacggtgaacaccatcagcagcatgccgaaccaatccagctgcggcgcgctggcccacgggcggacgaacggcgtcagcaccaaaccggatatgacgaacatgatgccgttgaccgcaagattgccccatcgcgctatcagcttggccggcagaatcgacagcgccgccgtacacgcagcgtcggcgaggccccatagcaatccgaccagcggcagcttcagcgtggaaagatctcctccggtggcgatcagcaccgtaccggcaaacgccaacgccacgccgatgctctcgcgcagccccggccagcggcgcccgcgtatgcacacatacgccagcacgaacagcaggttcaacgtctgcaatacggtcgcggtgccggagttcgtccagtcgatcgcggacagatacgagacctgcacgaacagcacgcaggtcagcgcggcgagcagcagcatcgggtaggagcgtcggtcgcgcaccgcacctgccaatagtttcggcgtacgcacaccggcacaggccaggaacaacgcgccggccgcgagctcgcgcacgcaggcgatccacagcgggtcggcgtgatagtcggccatcagcaatttcgacactgtggcgttgatgccccacagcacaccgccaagcagcaccagcacggcgcccagcagcatggctttcggcgtacgctcgaatgatgcagtctcgggcgccgactcggcggccggcgttttagactgtttcacgatatgtttcacgacatctttcattgcggactcatccggtcggcatccgtcacaaaccatcagaacgtcggcatctcagatgagccgaagaagcccagaatccgctccagatacggcccaagaacggcattgggcatgctgaaaatctcatgcagcgagttctcgatgcgtaccacgcgcacattccctccatcggagttgacctcctgcgcgaaccggttctgcggctcgttgagcacccacacgtcgcgcccggcctggaacagcagcaccggcgtctcgacattgtcgcacgcctccggccgctgcacggcacgcgacagtcgcagcgcctgccgcacccacgcgaatgtcgccgcgtacgtccgctgatgcgggtcgtcgatgcgctgctgttggaaccagcgcacgcgggcctcgctcgcgccctcgtaatcggccatatccagctccggcgtgaactcactctgcccgaacaccatgtgccgtcccagcccgagccggcacatcgcgccggcaagcaccgacgccagccagttcggcataccggtcaccggcgcgatcatcgggcacgacagcacggccttgtcgaacagcgtcggatgcgtctccagcacactcgccccgatgccgccacccatcgaatggcagtacaggttcagcggacggccatccgcgtaatccttgcccaccgtctccgcgaatttcgccagatcggccacataccgccgccaatcatcaatccacaccagggacgaattgtcgacgtcacgcgcggaatacccatgtccgcggtgctcgaacacgcacaccgagtaccctgcgagcaggaagtaccacaccatctccgcatatttcgcggcgaactccgtgaacccgtgggagatcaccacggcaccgcggaatgtggcggcggcaccgtcctcgcccaaccggtcgaatttcgccgcgtcgtaacacacgtaatgcagtttgcccgcacgctgcagcggcggcagaccgtcgtcgtccgccggcgccatccagccttcggaccggcatgtggcaagcgcgggcagcaccatctcgcgcatctcgtctgcatagcggttctcgtcgataagcttcacttgcatagcctccactgtaccgcctttcacgccggcgacgggcggggaaacgaccggcttcgtccggcgtcacggccgggcggccggacagccggcaaccggcggctaccggccgccgcacccgcgcggccagcccaccgctcgcccgccgactcacgtcacatgaccttggtggattcgagattgcggatgatccaatcattcaaccgcatcaccggcttgcgcagcaccaggccgagtagcagcgccggcaggatgaacagcgccagcttgcccatcgacacccagtattcgttgccgaacgaccccgccatcgccgaatgcatcgcatcgaccccgtacgggaacaacagccacttgcagatcgtctggaagaacggcggcaacgtctcgatcgggaaggtaccgcccgagccggccacctgcatgaccagcagcaccacggcgatggccttgccgatgtcgccgaacgacacggtcagcgtgtagatcagcagcgagaacaccagcgcgcacagccagccgaccatcaggaactgcagcggatgctcgcactgcacgccgaggaagaacatgtcgcccaggcataccagcgtgccctgcagcagcgccatcgcgccgaaaatggcgtatcgcccgaaatactcctgatacgggtgcaggccgaaccgtcgcgcgttgccgggcgactcggggcgtggcttgcgcagcacgtcgagcatcgcgcccggccctgcggtccgtccggcgatcacggcatccttcacgcccatcgtctcgcccatcggcagcgtttcgccgaggccgagcaccttcgccttctcgcggtcggacaccgacaccttcatcatggcgacgaggatgatcgcgcccacccagatcgacagcacggtatagaacggcgtcatggcggaaccatagttggcgaccgggtacagcgcgatgcggttcaccgagaccggggcggacagcagcgtggcgatcgaatcggggtcggttgacgtgatctgcgagagatcgggcatgccgctgcctccgacgaccgccgtcagctgcttgttgagcgagtcgagtttctcggccgaggcgttcagggtggtcgccgcgtcgcccaacgaggcttgcacgtcggacaggctgccggtgatgtcgccggacaggccggacatgctggtggcggtggcggccagtccgtcgatgacgctccccgactgcttgacgacatcgctcatcgacttgcccagctcgtcgagctgcggcttgatcgtggtgtcgtacgtgttcgccatgtcggtgatcgactgcttcgcggcggctatctgcttcttcagggatttgcgcgtgtcgtccgcgctggcggtgccgtcggtgattttcttggaggcgtcgccgatgctgtcggcgaccttctgcagactgttctgcgtgttctgcgcctgctgagccgcgttgttgagcgcgtccttgaccgcctgcaggtgcgcggcgtcggccagcgagcgcagcgcctccgcgtatgtgccgaatgtgtcggcctgcgattggatgttgcgctgcagcgtggtgagcttgtcggtaatctgggaggattgggagcccatgtcggagaacgcggtgtccacctgcttgctgatcgtgtcgtaggctcccgcggcgtcggacagcgacgagctcatgctcgtcgagacgccggctagggcctcgtccaggcttttcacgccggccgtgccctgtttcagcgctttcttcgcgtccgacgcgctggatccggtcgagccgagcagacggtcggtggagctgatgattttgcctgtcgcgcccatcaggcttgcgtaggagtcggcctgtgacgcggcggacttcagctgcgacgaaatcgacgaaatgtgtttcgtggcgttggatacgtactcgctcatttgcgggctttgcgcgaatttcagcaggctggataccaggtcgagggcgacctgcgcgagggtcttcgcgaaggtctggtcgatggtcgtggcgaccgtggacgcgccctgatcagtgatgtgcggcgcgatcgggttgattttctcgttgaggtagtactccagttcggcgtgcttcatttccggcgagaacagcgtcatcatgtcggcgctgaactgcttggggatgatcagcgccgcgtagtattcgccagaatgcacgccgtcgatcgcggtgtcgcggtcgacgaactgccagtcgaggtcatggttggcgcgcagcgagctgacgacggtctcgccgatgttgacacgcaccgggatcaggtcggatttgtatccgctgtcgacgttcgccacggccactttcaacgatttggtgttgccgtacggatcccagctggcggcgatgttgtaccaggcgtacagcgccggcacgatgatcagtcccatggccacgatgatcgcgatgacgttgcgcgtggcgtggcagacgtcgcgcgtgaagatcctccagatatttttcatcgcgtctcgtcctcctgcccggcgaacggcatctgccctgcgggcggtatctgctcggtggtctccccggcgctctcctcattgccgttattgccgccttcggcatcgtcattgcctgaaatcggttgcgccggccagtcaaggccgtcgagttcaccgagctccccgatgtcaccgtcgccggcggccccggcatcaccgtcgtcccgagccgccttggagacggccgcatgcttgcgcggcgacctcccggacgtgcggaacgtcaggtgccggtgcgtgtatccacgcagcacggcgtcgcggaacgcgtccgcgctcatggcgctgacgcccagctgccgcgcgtaccggtcccgcatgtattcgaccacgatcaggaaggcatcgatgatgattatcgacaggatccacgtcgtcagcatcgccaccttgtttgggatgacgaacagcaggatgaggaacacgaacggcagcacgatcagcagggccagcccggcgcggatcagccgcggatagcgcccgaagaaccgtttcgcgcgacggcggatcaccttgcgaagctcttcggtgttcgagaactcgttcaggatcgaagagaagctcaccgactcgttgaccatcgcgttgtgctcggtcatcatcaggtcggtttcggccagccgccggtcgaacagcgcgttcaggttcagcgcgtaccggcgcacgaccagcccgatgaacagcgcgacgggcaggtacaggaacagatgcagcatgtcgctccagtaatggttgccgtagagtcccgctatcgggccacgcatcgcgttgatgccgtacgtgaacggcagccacgggtgcagctcccggaagaagtccggcatcatctcaatcgggtacaggcccgacgcgcccggaatctggacgatcaccagtatcacggcgaccgccttgccgatatgccggaacgcgaccgcgagcgcatagatgatgttgatgtacacgaacgagcagaacagaccggcgaggacgaacagcaccggacgctggcattggatgccgagcaccagatcgccgatcatgacgatcagggcctggaggaatccgacgaccacgaacagcagccaccgcccgagatacgcctgcgacgcggtcacgtcgccgagccgctcgcggtcaacctctagcttgtagatggcgatgagcacgaagccgccgacccacagcgccaggttcgtgtagaacggggtgaccgcggagccatagttgtccatcgggtagacgcttttagtggacagttcgaccggtgtgcccatgaattcgccgaagctgtcgccgtcgatgttcagggcctgcttgattttctggtatgtggccgaactgccgagcgcggcgatgtcggtgcgcacgccgctgacgctgtcggtgaggtcggcgagcgatttctgcgtgccggccacggtggttttcgcctggctcagcgtgtcggacagctcgtcaaacaggctgtcggactggccgagcgtggatgacagcgatgacagcgtgccgtcgattgtgccgctgagcgtggcgaagttgctcaatcccgcggtcaggttcggggtgacggttccggtgagcgtcgtgcgtgcgcggttgagtatgccgatgccgctgccggtggcggtgctggtgacgtccgaaaggctggtggccgcgctcttgccggagctgatgaactgtgacgtgtccttgtggaaggcgtcgagttggccctgctgggtgttcacggtcttgtcgagcgcgtctatctgctgccagatctgcttgccgatggcggtgtcgcggccgatgccggccttgttcatcgcgtccttgaggtcgctggacagcgtagccgcgccgtcgatcggcttctgcagagcgttggtgatgtcgtcgatgctgccttgtgcggtgttgaaggcgctgagcgcgtctcccgccgcgttgttcacgctgacgccgatgccggacagctgcacggatccgttgtcgaacgcgcccgcaagcgacgacgagaacgattgggcgctgccctgcacctgcgtgagcagtctctgtgactgtttcgcggctttctgcgcggatgagatctgacgtttcagcgaggcgacggtggacttggcctgtttgatgcccttttccgcatcgtcgaacgtgccgcccatgcgcccgagcgatgagtcgatgtcgttcagctgctcgatgaggccgttgaggtcgttgacgacgctggtgcgcgtgccgtcggcggactggctgagcttgccgccctccttcgtcatcgtttggacgagtgtcttgctgacggtggagacgaatgtcgcattgatctgggagtcgatggtcgtggcgcccgtatcagtgattttcggcgcgatggcgttctttttctcgttgacgtagtagatgatgttcggcttgtcggaagagccggtgatcgaattgatcaggctttcgctgaagtccttcggcagtacgatcgccgcgtagtattcgccggactgcacgccttccacggccttgtcggcgctgacgaacgtccagccgagccggtcgttcttcttgagctggctgacgacctgcttgcccgcgtcgagccgcccgaccagatctgatgcagtgcccttgtcttcattggcgacggcgacctggaggttgccggtcgacgaatacgggtcccagttggcgaggatgttgaaccacgcatacagagaggggatgatggccacgcccagcgtcaccaccaccgcgaccgggttgcgcaggatgcgcatgaggtcgcgcgtgaatattcgccaaatcgtacgcaccaaaccccccgtttcgtatcttccgcccgatcatgctcagtgagagtatatccccagccgtaagagctggattcgcccacagcgcaccgccgaggccatatgtggacacgaaccgcccatatgtcgaacgcgatatcggacatactgtgcacaagcgccgccgatgtcgcatttgccgcgtttcggggcggaatgccgttccattccgccccgaaacgggcgaccggtcacaggtcgagggcatcgcgcaggaagtcgcgctgcagcgtcagcaggttctccgcgacgaccgggtcattggtcatatgcgtgattccggtcagcggcaggaaggtgtgcggacggccggcggccatcagcgcctgactgaggcgcaggctgtgcgcgatggtcacgttgtcgtcggcgaagccatgaatcagcatcagcgggcgggcgagcttcggcgcgtcggcgatgatgctgttgcgctcgtacgccgccgggtcgagcccgaggtagcgctcggtgtaatgcgtgtcgtacagtgtccaatcggtgggcggggcgccggcgcatgccgccttgaccacgtccggggcgtccaacaccgcgagcgccgacaggaaaccgccgtacgaccagccgatcatgcacaccttgtcgaggtccggggcggggatgcgcgacgcgtcgccgtcctgcgcggcgccgcggttcagctcctcgacggcctgggccaacgcatgcaccgcctccacctggtcggcaagcgtgacgtccttcatgttctcgaagatctcacggtcccatcgcggcccgcggcctgtggtgccgcggccatcggcggtgacgaccaggaagccctggtcggcccaccactgcgcgtcccagtagtacgcctggttgaacacgacctgctggaatccggggccgccgtacggcttgagcagcaccggcagcttgtcggccttcgcgtacgggctatcggcgctcggcgcgatgatggccgtgtacaggcgatgctcgccgagccgggcgaagcgcacgttcggcgcgaaaccgggttcggcggcatggttgtcgatcgggcagacgagcgtgctcatcgcggcggagccatcgccatcgttttccggcgcggctcccccgtcgaccgggcgcatcgtgaaggagtgcgacatcacggatttcgccgagtccatgtcgcgcccggagatcaccaggccctcgccgcgccggctggccgaccaggagccgggccgtgcggtcatcggcaacacattgccatcataatcgaagctcaccacgtcgaagctgcgggcgtcatggccgtcggcgtcgcctcgccacgggctcagtccgtcgggcgcctcgtatccgtccagttccggggtgcgctgcacgaccgccagcacgtcctcatcggtgacgtcgagcacctctcgcacctgccagccggcgggtgtgaacgggcggccgtccaccgtcagccggttggtgtcggcgtccatgtcgttgagcgcgcagaccaggcgtccgtccggcgtgaaggccggcgtgccctggatgatgtcgagccactggtcgttggcatgctcctccagcacggtcgtggagccgaccggcgccgagccctcagaggcctcggagccgagatgcaccgagagcacctggtcacgcgtctgtcggcggttctgcaccagcagcaatggctcatggccggcggaccagtgcaccgcggcgacatattcatagtccttgcggttccaggagatctgctggatgcccagtcccgcatactcgtcgtgcccgtcgtacgcgagctccgccagcgtcaggcgcacatcggcgttgctggtgagcgcacgcgcgtatcgacggccggaggccggcgtctgcgggttcgccgggtcgctgatgtaccacatcggctcgggtgccgcgttgaacgtctcgaagatgatgtgacgggagtccggcccccaccagaagccgtcgtaacggtccatctcctcgccggcgacgaattcggccagaccgatcttccacgtgttctcgtcggcgtcatcgtccggatacacgctccacagcgtgctgagcttgtcggcggaggggtcgtagggggcgcccgactcctcgtcgccgcagcggtggccgtgcgcgtgcggcgccggctggccgtcgcagtcgtcgtcggtggcgtcatcatgacgaccgtcagacggccactgcggcgcgatgtcgaccagcatcagatgttcgccggtcgtgtacgccacatgcctgccgtccggcgatatgcgcggattaagcaccggcgtggcaccctctcctgcggcgatgccatccgccgccagcatacgggtgcgaccgctgccgtcttcggcgatctcggtcagaaacagctgaccgttgatcgtgaagaccacacggcggccagccgcatccaccgaatacgagacaatgcccgagccgccttcacgggcgcgctcgcgacgggccttctcctcggcaggcacgtcctcgtcatcagcgtccgcaagcagcacacgcgggtcggccagcagcacctcccgatgtgtgccgtccgcgtcgaacacgctcagccacagcgaggtcaccaggtcctcagggccgtcggaacgcaggaacagcacgcgggaaccgtcgccaatcgcggtcgcggaacgcggggcaccgcaggagaaccgcaacgtctgcgccttgcggcggggaaaatcgccgattgcatcatgaagagtcgtcatatcgttcatgcccaccacggtagccaccgcactgggcaaaccacgccggccgccctcccccttgcctcccccatgatcgccccgcgggctggcgcatcaggcggacggcatcggtccaaataggtctcacgccccacaacaccgtgtcagaagtggaaattttgcgctcaaacaggctttttcctcagaaatcacaattgacttccccactgacgtataggatgggtaaggatatagaaagggatcaccatgagcgttctcgaccgttttgagaaaagtgtagaaggcgcggtcaacggagtcttttccaagttcggctccaaagacctgaagcctgtcgacctttccagcgccctggagcgcgagatcgacgccgaagccatgccggtcggccgcgaccgcacggtagccccgaacgaataccgtttcaagctcagcacggccgacttcgatcgcatcgaacagtggggcagcgaagtgctcgccaacgagctggcggacaacctcacgcaatacgccaagagccagcattatgcgttcgtcggccccgtgatggtcatcttcgaggaggacctcgacctgcccaagggcagcttcaacctgagctccgaatccgtgcagggcaacgcggtccccgtgaccaccaccgaccaggccgaggaccatccgatgcttgacatcaacggcaacccctacctgctcaccgagagcaagacggtgatcggccgcggctccggctgcgacatcgtcatcgacgatcccggcatctcccgcaagcacctggaaattgacctgacccccaacggcgtcatcgcgcgcgatctgggctcgaccaacggcacgtacgtcgaaggccatcaggtgccggccgcgacgctgctggacggcaataccatcaccatcggccgcacccgcatcctgttctgggcttcctcacgagagcaggagtgaccccgagccaggagtcgactttccgttatgaccgaactgacatttgcgatcctcaagtatggattcctgatcctgctgtgggtctttgtctggcttgcggtgcgatcgctgcacaaagacatcgaagcgttcagcccgcagccgtcgcgggcccgacgccgccgagacaagcgcgcgatgaaatcctctgacggcccggcaccgtccggcccggccgccgcacagaccgcgcccgttacgccgccgcgccaaagccagcagcgcacgccgcaatccggtcccacactgctggtcatcatcgatggcccgaaggccggcgcctccgtgccgctgaccagcgaatccatcacgctgggacgcgccgcgtccaacaccgtggtgctcgacgacgaattcgtctcctcgcatcacgcccgcatatataaggatcccgcctccggtcaatgggcgatcgaggatttgggaagcaccaacggcaccatcgtcaaccagcagcggctgaacatgcccatgctgctgcccccgcgcatgccggtgcgcattggcgccaccaccttcgaattgaggtgacggctcatgccaaattccgttgcatcacagaccttgttcctgtactcgaccacggtgtccgacgtcggcaccgtgcgctccaacaaccaggattccgcgttcgccggggagcacctcatcgcgatctgcgacggcatgggtggccatgccggcggcgacaccgcctcgaccatcgccatccgttcactcgcccacatcgagcacgatgacgtcaacggcgatgtgagcaccgtcgcccggatgatggaaacgtccgtcatggccgcgcacgacgcgatcgtcggcaaggcgaagcgcgagcgcaagctcgccggcatgggcaccacggtgaccgccgtggcgctggtcgcaggctactgggtgctcgcgcacatcggcgactcgcgcgcgtacctgctgcgcgacggtcgcctgacccgcatgacgcaggaccacagctacgttcagcatctcatcgacacaggccgcatcagccccgcggaggcgcgcaaccatccgcagcgcaacgtcgtcatgcgcgtgctcggcgacttcgacatcgatccgcaccccgacatcgccattcgggccgcccatccaaccgaccgttggatgctgtgctccgacggcctgtgcggcgtgctggaggattccaccatcgagcagacgctcaccgcctactccgatcaggaggaatgcgcccagcagctggtttcgatggccttgaaggccggcagcaccgacaacgtgaccgcggtcatcgccgacgccacgctggctctcgacgcggatgccttcgacctgccccaccagaccccactggtcgccggagcggcgagcgccagcctggagcccatcgcagacatcctcaacgagcctgtcgccaccgcgcccatgctgcgcgacgcgaacgcatcgccagcgcaacgcgccgccgcgctgatacagagccagcccgcctcgcagccgtcgccgcgcgtcgcgcagccgtcggccgtgcgcgaggagaacggcgaacgcgccaaccccgacaccggcgagataccggtcatccagaagcgtgacggccatgtcaccgacgatcccaacgatcccgacgtcgccaaggccatccatcacgagcggcagacgcagcgcaaggagacgcgcaagcgcggccgccgcaatcgtctgatcgcaatcctcatcgtgatcgccgcgctcgcgcttgccacgggcggcgctttcggcgcctaccgctggagccagacgaaatacttcatcggcaacgcagacggcgtggtggccgtgtaccaaggcgtgaacaccaacgtgttcggcctggcgctgtcgcacgaggtcaagcgcacgaacatcgacatcgactcgctgccgcaggcgtggcgcgaccagctgcaggacggcatcaccttcaacagctatgacgaggccatccagcacgtgcaggtcatccgtcaggagaaaagcaacttcaacgacaattccaacacgtccaagtcgtccggcgacgcgggcaacggcacgtccgactcatctgactcatccgactcatccgggtcgaacggcacggacggcgactcaagcgccggcagcagccaaaccgacggcggcactgcggatggcaccgcgggcgataccggcacggacgcatcgtccaccggcacagacggcggtgacgcccaatgatccccatacgtctccgtcaggcgtcgctgctgctgttcgccatgctgatcagcgtcgtcgccttctaccagatgttcctgcgcgtctacggccacttccccgccaactacatcggcctgctggccgtggtcggcgcgctgttcctcgtgctgtggggactgctgctgcggttcaagccgtacgccagccaggcgattctgccatgcgtgctgatgctgaccgcgatcggcgtggtgatgatcgcgcgcatcgacaagtccggtaattcctcggtcggctcaaggcagctgatctggttgtgcatagccctgacgctgtgcggcatcctcgtggcggtcatgcgcgactatcgtgtgctgcgcaaatactcgtacgtgaacatggtgataggcctgatactgctgctgtcgcccatgatccccggtctggggcgcaacatcaacggcgccaagatctggatccgcatcggcggatattcgctgcagcccgccgaattcgccaagctgttcctcgcgttcttcttcgccgcctacctgttcgaccaccgcgaccagctcgccgtgggaggcaagaaggtgctgggactccagctgccccgcatcaaggacctcggtccgatcatcatggtgtggctgatctcgatgggcgtgctcatcatgcagcgcgatctgggcacgtcgctgatgttcttcgcgatgttcgtcgcgatgctgtacgcggccaccgggcgcagaagctggatcgtcatcggcttcatcgcgttcgccgtaggcgcggtcgccgcggccagcgtgttcagccacgtcggccagcgcgtggactcatggctgcacccgttcagcgacgagcagtacaaccgcataggcggctcgtggcagctggtcacgggcatcttcggcatggcctccggcggcatgaccggcaccggcctgggtcacgggcagccggggctgaccacgttcgcgaattccgacttcatctattcgtcggtcggcgaggagctgggcttgaccggtctgatggccgttctggtgctgtacctgctgatcatcgcgtccgggttcatcaccgccatgaagatcaaggacgggttcggcaagctgctggcctccggactggtgttcacgatggccttccaggtattcaccgtggtcggcggcatcacgctggtaatcccgctgaccggcatgaccatgccgtacatggccgccggcggctcatcgctgatcgcgaactatctgctcgccgcgctgctgatgatcatctcgaacgcggcgaaccgcccggagccggacacactgtccgacacgttccaatacgaggcgctggcggtgctgcgtgaccgcgagctgaaggaacgcactgacaaggagtccgcacccgaacgcgaaccgcaggccgagcggccaccggaaccccgccacgcggcggcgaacaaccagaccacggaaatcatcgaggcaggtgcgcgatgaacaaatacctcaggcagctgttcaccgccgtcatcgccttgttcgtggtactcggcatgtccaccacgatcatcaccgccatccgcgccaactcgctgagctccgacccgcgcaacgcaagggcgctgtatcaggaatacggcgctccccgaggcgccatactcgcgtccgacgggacgatcctcgcgcagtcgaccccggtcaacgacgtgttctcataccagcgttcctacacgaacgggccggtgtacgccccggtgaccggcttcttctcggtcacccagcgcggcgaccgcggcatcgaatcatcccgcaacaagctgctgagcggcaaggcggacgcgctgttctgggatcagctgaaatcgctattcaccggcgtcgagaacaagggcgcgtccatcgagacgtccatcaatcccaagctgcagcagctcgcctaccagcaactcggcagcaacgacggcgccgcagtggtcatcgaggtcaagaccggccgcatcctgaccctggcgagtgcccccagctacgatccgaacgctctcgccacgcacgacacgaagaaagccaccgcgaactattcgaaactcgccgcgcaggccaacagcccgatgatcaaccgcgcggcctcgcagctgtacccgcccggatccacgttcaagaccatcgtcgccgcgacggcgctggaatccggcgactacgacaccgatactcagattcccgccggagcgagctatacgctgcccggaacctcgacgaacctgactaacaccaccgccgcggcgaacggcatcgacggcaagatcacgctgcaggacgcgctgacatactcgtccaacaccgcgttcgcccagctcggcgtgaaactcggccaggacaagatcgccgagcaggcgaagaagctcggctacggaagctcgatcaccatcgacggcacctcgtcgtccgggcgcccgatgaagtccgtcgccgccaagttccccgacacgctgtccgacgacaaggtggcgctggcgtccatcggccagggcgacgtgctgtccacgccattgcagaacgcgatggtcgccgcggccatcgcgaacgacggcaagctcatgaggccgacgctggtggaccgcgtgcgggccagcgacctgagtacgctgtccgaagccacgcccgaagtgatgtccaccgcgttcagctccagcacggcgtccaagctcaaccagatgatgcagtcggtggtcgagcatgacgcgcccagcctgcagctgagcggcatcaaggtcgcggcgaagaccggaaccgcgcagatcggcagctccaaccagaccaacgacgcatgggttatcgggttcgcccccgccgacaacccgaagatcgcggtctccgttgttatccataatgtcaatcagtacggtgtggaagccgccggaccgatcatgcgttcactgatggaggaggccctgaaacaatgaaactcgtcgaaggacaactcatccaccgccgttaccgcctggatcgccgactggcgcagggcggcatgggagaggtgtggaaaggccacgacatccagctcaaccgtcccgtcgccatcaaggcgctgcgcgacgatcagggcaacgtcgaggccaagctgcaccgtctgcgggcggaagcgcacaattccgccaatctggcgcaccccaacatcgccgcgctgttcgagtattacgagcacgatagcatcggcttcctcatcatggagtacgtgcccagcgactcgctggccgacatctaccgcgaccgtggcacgctgcccgcgacggaactgttgccgatactgatccagaccgcgcgcggcctgttcgtggcgcacagccacggcgtgatccaccgcgacgtcaagccggccaacatcatggtctccactacgggcgaggtgaaaatcaccgatttcggcgtctcctactccacgaaccaggagcagatcacgcaggatggcatggtcgtcggcaccgcgcagtacatctcccccgagcaggcgcaaggcaaacaggccacgccgcaatccgacatctactcgctgggcgtcgtcgcgtacgaggggctgtgcgggcatcggccgttcaccggcaccacaccggtcgacatcgccgccgcacacgtcaacgacccggtgcccccgctgccggattccatagatgtgcagcttcggcagttcgtcatgtcgatgctgtccaaggatccgcttgaccgtccgaaggacgcgctgaccgtttcgcgcacgctgtcgcgcatagaacgacgtctgctcgatcaggagaccgcgcagatggatgagaccatcatgggacttggcgggcgcatgccccgccgcgtatccagcacaccgcacacggcgacgctgatcaccatgaaccgtaaccaatttggcgggcatacggcgacgaccgacccgaagaatcgagaggaatagctatgagcagcaatatgccggcatcgctggcgaacggccgctatcagctcggccaacttgtagggcgtggaggcatggccgaagtgcgcgtggcattggacacgcgcctgggacgtacggtggcgatcaagatcatgcgcgccgacctggccaacgacaagatcttcctgtcccgattccgccgcgaagcgcactccgtggcgcagatgaacaacccgaacatcgtcaacatctacgactccggcgaggagaccgtaatgaccgacagcggcggcacggagcggctgccgtacctggtgatggagttcgtcaagggccagacgctgcgtgacgtgatcaaggcgaacggcccgctcagccagcgagacgccgaacaggtgatgctcggcgtgctcaacgcgctcgaatactcgcatcacatgggcatcgtccaccgcgacatcaagcccggcaacatcatgatctccgagcagggcgtggtcaaggtcatggacttcggcatcgcccgcgcgctcgacgactccgctgcgacgatgacccagtcccagggcgtggtcggcaccgcgcagtacctctcgcccgagcaggcccgcggcgagaccgtcgacatgcgctccgatctgtactcggccggctgcgtgctgtatgagatgctcaccggccgtccgccgttcaccggcgactcggctgtggcgatcgcctatcagcacgtgtcggaggtggcgacgccgcccagcacgctcgtgcccggcctgccgcgcatgtgggattcgatctgcgcgaaggcgatggcgaaggaccggcagaaccgttacgcgacggcggccgaattcaagaacgatatcctgacgttcatgaacggcggcgtgccggtcgcggcggcgttcaacccgctgaccgatctggccaacgtgaaggcccgcaaggccgcggagcagcaggacggcggcgctaccgtgccgatgagtgctgtcggcgcgggtcagcccacgcaggcgtacaacccggcgaccggccagttcgagatggtgtctccggcgcagaacccgaacgaggccctggcagtcaagtctcgcgccgagcaacgcgcggaggcggccaggcagaagcgcaagaagaagatcatcatcgcgtcgatcatcagcggcgtggtgctgctggcgatcatcttcggcgtgatctacaccatgagccgcaaatccgccacggagatgggcaccgtgcccaccatcacggcgacgatgaccaaggcgcaggcgaaggagaaggtcacctcggccgggttcaacttcgtggagatgcaggattcggattccggtgaacccgccggcacgttcaccaagcagtcccccgagggcgacactcaggccgtcaaaggctcggacgtgaaggtctggttctccgtaggccccaagtcggtgaccgtgcccgacctgagcgactatacccaggaggatgcgcgcaacgcgctggagaaacggggcttcaaggtgtcgtccgtcacgaagaccgccgacagcgccaccatcgagaaggacaaggtcgtgagcaccgacccggcctccggcacgtcgcagcccaagggcacgacgatcacgctgtacatctcctcgggcatgaccaaggtgccggacggtctggtcggccagcccaaggacacggtgctggacaagctctcgtccatgaagttcctgccggtcgtcgagcaggaggcctcggacaaggtggagaagggctcggtgacgcgagtcagccccggttccggagaactggtgctgcagggctcgcagatcacggtctacgtgtccaccggcaagccgcaggtcagcgtacccaatctcctcggcaacacgatcgccggggccaaggccacgctgggcagcgacttcacgctgaaggtcaccggcgacgcgaccgatgatgcggtcatcgagacgcaggatcccgcagccggcacgcaggtcgacaagggcagcaccatctcagtcaccgccaagaagcccaccaccgaggatcccggcaacaacggcaacaacggcaacggcggcacgacgacaggcggggactgaaccgccgggaatggccgtgattgccattatggtgtgaccgatcggccgcctgacggccggtaagcgcaaccggcaatcgcggcgggtcgatcggccagacgggcggcccagccgcgcggtctacacacatcggcccagaacacatgatggcccgtggcattcctcatgccacgggccatcatcgttgtcatgcgcgtcacgcgtcacgcgcgacgccacacacacgtgcgtgtcagcggttgaccttgggctgcagaccgatggacttggccacggcgttggtctgcccgcagacggcgagccagttggcgagcagccggtagccgtcctgcgtcatcaccgattcgggatggaactgcaccgcatacatcggcaacgaccggtgcttgatgccctgaacgatatggtcatccttcgtccacgccgtcacgaccaggtcatcgggcacggtgtcgggctcgacggccagcgaatgatatcgggtcgcggtcatcggattggcaacgccggcgaagatctcatcatcgatatgctctacgagactggttttgccgtgcatgatggtgggcgcgtggctgaccgtgcagccgaacacctcggcgagcgcctgcaggccgaggcacacaccgaacatgggcttgccgagcttggcacatagccgaataacgtcctcgctggccccagaatccgccggagcgcccggaccgggggaaataagcacaccgtcatattcgtccagcacagaggcatctgaggggtctattgcgtcgttgcgcaccacatcgaccgtcgctcccaaggttttcagatatccaacgatggtgtatacgaacgaatcgtaattgtccaccaccacaatgcgtgccgaatccgtcatgacgctcctcgtctcgttctgattatgggatggcgccggcgagcgccgaccgccatcccatacgttcccattatcgccgccaaccggccatgccgctaatcgaccgcgtaattcgacatgctttgcaggatggggatgtggcttgccgcccatgggcacgcccactgaatcagcgccacgctgacgatgaacagcagcagtatcagcagcgcccacctgattaccagcggaccgggctggtgacgcagcagccatccgtagatgctcgcgtccggacggcggcgcttgccggcgcgaatctcgcgcagcaccgggtaccgccaggccaccagggccgcgatgtacagcaccaggtacgccaccagcgcccacagcacgatgggctgcagcgtgcccagcttggacacgaacgaccggctcgtgttgctgctggagaacgccaccttcgccgagttcgacgacgtggcgagctcctgcggcacgccatccgagaccttggcccaatagctcagctcaccgtagctgatccaacgttgcgtggccgtggtgtatttcggctcgcacgtggtcagtgtgatcatgcgcttgctgggaggcgtgttgagatcctccgggttagcggcgatgacctcggagtgctccggggtgacgatcttgtgtgtcgtgtacttgtacacgtaccagtagtccttggtacgcacgatgatcgcgtcgccctcctgcagcaggtcgacgtctcccagcggtcgaccgtagccgttgcggtggccggcgaccgcgaaattgccgactgaaccgggcatctgcgtggacggataatgtcccagaccgtgcagcgacaattcggcctcgtccgtgccttcgaccacgttacgcacccacccctggccgaaccggggcacgtacacctgcgcgatgagctcgccatcgcttgcgctcgtcggctggaccggcacgtcgccgctttgcgccttggcgaccttcgagctgtcgccgccggccggatcggaccatgacgccgactggcgggtctcgacctgcgtgtgctcggactggacgccggtccaccacatctgccataccacgtacagcgcgcagacggccgccagcgtcatcagcacctcgccgaggatccccagcaccgaccacagaacgctgcgcttggccgccggctgcgcgaggccgcgccgggcgttcggatcgggcatcggcaccggaggcagcgccatggtcacttccccggcgtactccggttcagcaggggcaggcgcctcgaaatcctgaaaatcgccttgaatctgttgagagttgcgcgaatgcttcattcctcgctcccgtccttgaccacggacgcataccgcaacggctgcagcgtcgccgcagactgcccgaacacgagatcgtcctttttttccactttccagcccaatccgaatgcgctgacatactctttatacaacttgaccgcgttcgagtcgtccaaagcccgaatcatggcatctgcggggccgatcgccgacacggtgaacggcggcgagtatttcttgccctgtaatagaagcacattcccttggcagatcactgcggaattgaacaacacgcgctggtccatgatcatcatcgactccgcgccgcccgcccacagggcgttgacaacagcctccacgtcctcctgatgcacgacgtaatcgttgatgttcgcggccgagcccgaactgtccaccatgttctcccacaacggggagtcgttcagggtcacggtgatgccgggaccgtgcaccgccggcagtatggtgccggagcccgcgtcctcggtgtcgctgggcttggggtcgctcgtgcccgagggctgctcggaggagccactgttgttggcgaaatccttcagcgtgttgatctgcgcgctcaggtcggtgatgtccttctgcagctggtcgacatgctccacgcgctgctccaccaggtccgccgtgtcggaagtgaccgttgccgtgcggttcacgcgcacgttcgtcaccagcagatacccggaaaaagccacgatcaggcacaccgcgaagccgccgagccacgtgcgccgggcggcgtgcctgctggtgtgtctggccatgattcctcccagtgtgttcaactttcgagtgtaaccgctattatgattttttagcctattgaatggagactacgcttatggctgacacagagctgcacgaaaccgactcggaagaccagaaggactggcaggccgagaccgacgccgacgtcaaggacacggacaccaacgagaccgacgccaacgagaccgacgaggccgatgacgattacggcgtctccatggacaaggtgcaggcggtgctcaacgccaccgccgacaagtcagagatgaccccgcagatgcagcgcatgatgtcgcggcaggcggagaacacgcgccgcgtcgaggagaccatcaagggcaccaagtcgaacccgcgctggttcgtcccgctgttctgcgcgctgatgatcatcggcctgatctgggccgtggtctactacctgtcgccgaacggcacgtggccgatcccgggtatcggtgcttggaacctggcaatcgccttcgcgatcattatggtcggattcatcatgacgatgtggtggcgctgagcggcgagatcccctcgcggcagccagctccatatcgacggtaagcgacgttacggtttggcggtggcgcggcaccatgctgcgccaccgccaaaccgtgttgttgtcatacccttttcgcggtttcactgcttcacggtgcggacgatgacatgacggccatcgacggacgtcgtgccgaacagatacacatcgccgccgtctgccagcttgagtttcctgcgcagctggacagcggtcaacgggaagttgcgcactgcgatattcgccctgtcgacgcccgctagagcccgtttcagctcttttttgcccatacccgcgatggtttcaatgacaaatccccggccgggaaactgcggcgccggcgtgcccgatatcagcaggtggctgttcggaccgatctggcgcataccataatggtcctccagcagcgcgaaacagccgcccttcatcagcgaagcgttcggctcgtacagatacctgggctgttccggagcggcgtgtggcggctctgcagacccgccctgactgcctttttctcctgcggcggcgaggaccacaccgtcagaatccgcgccggtcttcatgtcatggacgtatccgaatacgtcgccatcgttgacgcagatcacgcgtatggcgtcgtgcgaaccgcggtcgagcaccagcagcagttccttgcattcgttgcctgtggagacgatatgcacttcgccgaccgaaccgttgaagtccgcaaccgtctttcgccaatccagcatcggagacagcttgaccatgacgtgcggcgaaacggccagcagacggtctttcagcgcgagtacgtccggcgtgcagtcggcgatggcataggttcggccgccatgcgcgtcacgtcgcgcggggtcgaggtagatcagcgcgatgggaacggctgtagctgaatcgactgcggccgagtctgcggaggcggcgcgggaatcaacgacgccgcgcagccaatcctccgcatcgccgttgatcacatccatgtgcgggagccccagcgcccggaaattatgagccgcgagctcgcacaggtgaggctggcgctccacatagaccgcccggctgaatccacgcgcgatatacgagcaatcgacgccgaatccgccggtcagatcgaccatcgcaccgccggcgcccgctacgcgccttgcgatgccggccttgtactgcgcggcgaactgggaagagcactgttccatggagatgtgcggcggatagacgatgccgtcggtctcggcccattgcggcagcttgcggcacgcagtctgccagccggcgatctggtcgagcgcgaatggcaggtcaagcccgtccacgcgtttggcgctgagcgccaggtcgcgcacatcctgattgcggtgcgccgcaatgaaccgactggtctgagacgaaatatccatagtgtcatggtatcccggcagcgtcatcgcgccccggcttcgagatccgtaacggatgctccgcaaatcaagttgtgcactgtctatccaccggttttccccatgttatccacattattcacatacttatacacaattgtggataactcttattcgcattgtgcacattgtccacaatgtgtcaaaacccagtatttccaacattgttagagctcacacggacttattcaccatagttatccacgagttatacccaacttatacccaagttgtccacaaagttctccacatcatgtggaaaactacacgcatgtaattcacattggtgcgacgcttccaccccgagccattctccagtgccccgccaccccacaaaagtcccatcacaagctcgggggtggtgacgttttgttggacttcgttgtctgtatggttgtctggcaggttatcacatgtgttcagccgacgagccccagcttgatgcgcctgtccatgatgctcatcccgtactcggtcttgatgcgttcgtcgcgctaccatgtcatgtactcgtcgagcatcgtcggcgaacccgtcgaccgtgacgcccgtgaagtcgcgcttgtggaagaactcctgcttgagacggccgaagaacccctccgcggacgcgttgtccgggctgcagcccttcgcgctcatcgagcggatcagcccgtggcccttgcagatgcgtatccattccggccactggtagtggcagccgcggtccgagtgggtgacaggcgcctcgccgatctcacccctgtacgaggagtagcgcctcgcgctcctggacacgggcacgagcccgtgccgggtcatcaggcgcatgacccgtttggcgggcacgacgacgcccgcgcccctcaattccaggtggacgcgcctgtacccgtaacggcgcctgctgttctcgaacacgtcgcgccaggtgggactttcaccgggtaagaggccaatcacatgatgtacgtcagagccggattgctcagattacagaccagcacgcctgcgacgatcagcgccaacaccaccgccccgtacaccatcgtccggaacgtcaggctcttgccgcgcaacgcgtgcacgccggaaatcagcagccacgtgaacacgccgccgacgatgaatccgcctacatgagcctgccatgcgatgccgcccaccaggaacggcatcaggaagttgaccgccatccagaccagcatcgaacggatatcctctccgatgcgccggtacacaaccagcatcgccgcgaacaggccgaacaacgcgccggacgcgccataggcaccacaaagccacccggtgccacccggccacagcgcggcccaggacatcagcccaagaccgccgcccaaaccggaaagcacgtacagcgcgagaaacggccaatgccccatcatcttctccagcaccggccccacgctccacaacgccagcatgttgaacaggatatgcagcaccgacttcggcgaatgcagaaacatcgacgtgaggaacatccacggttgtgcgaccgccgtcagcgggtcgaaccggccgtaatagatcatggttgcgagtccaagaggccagaacaggctgaacaccatctcgacaacccacacggcgacgcacgcgatgatgatcgcgctggtgaacacagggccgttcgaccgccactgatattgaatcgcccgcttggagaacaggttgtgcgccgacggcgcaccgggaaacaaactgaatcggccattactcatgtcatctactgtagcggaatcgcatctcctcgccggacggtgaaacaacacgctcccggctcgtcgtgcgcaccgccggcaaagcaaaagcattcccgcacgcaatcgccacatttttggaattaagatggaacccagagttggttttgaacgggcaagccaaccaggattgggaaaggagccgtcatggagaacaagtcttcaaacggttggaagttctttgcgttgttctttggtgcgctgctggccgccgtggttggtctgtacatctacaagcagcagaacccggattatgatccgtgggaggagccttgggagaacagctcgtccccggtcgaccttggcctgaccaaggacgccgacaagggcgacgccgatgagtccgaagcagccccggaagccgcctgagttcatttaacagtcaatcgttgtaggcacacatgtgtccgcgaaaagagcctgtctgcatttcgcagacaggctcttttcgcatgttgtgccgcattggggctctcagaactcgcagttatagaccattttcagcaagtattgcggtgtatctgcgagttttgagagccccaatgcggcagacaagggttctggatggctcactgcatggcggttccaaccttgcccctcttcgtcgagacatgccccaccgccgccacgatcgaaaaacggcagcaacgtatgcggtgccggcaagcccgaagcgtcgtattcgcaaggcaagacgccggttccgaacctatgcgatggcaataccgacaccgcgtggggcgactggcagtccaagggcagtgtgaagcccgagccttgggtgaactggacgttcgatgaggcgaagaccttggattacgatctttccggatcattgaacatcgagactcaggcgtatccgcgtcgttcgcggtcgcgatcgcgtcaaatggtggccagcagccgaccacgccgagcaagcccggtgatggcgatgcttgcaagcggcttcctgctgctaatcgccgcagtcgccgtgttcgccattcgccgcgctgcgcagtgatgtaaaacgtgattcgctcccgccaacgggggcgaatcacgttacacgccgtcagtcggcaagcgggcgcagcccggcggactgattacgtgtgcgtcctctaggcgcaccgaaggaaacagtacaaaggtaccgcgactgaggagcaacgacgaggacgctccgtaatcaggccaacggggaggtgtgccagatgttgtcgagataatcctggatcgacctgtcggagctgaagtagcccgagttcgcgacgttgaggacggccttgcggttccactcgagggggtcgcggtagagggcttcgatctcactttggatgctggagtaggcggtgaagtctgcgagggtcatgaaccagtccttggtgagccagtcggcgacgaggggggcgtaggtgttgcggtcaccgttggagaaggtgccgtcggagaccatgtcgatggcggccttcaggcgggggtcggcctcgtagtacttggccggcgagtagccatcttcgtagagcttgtcgacctcgtcgacggtcatgccgaagaggaagaagttctcggcgccgacacgctcacggatttcgacgttcgcaccgtccaacgtaccgacggtgagggcgccgttgagggcgaacttcatgttgccggtgccggacgcctccttgccggcctgggagatttgctcgtcgaggtcggtggctgggatgaggtgctgggcgaggcggacgttgtagttccaggggaagaagacgtgcagcttgcccttgacgtcggggtcgttgttgacgacgcgggcgacgttgttgatgagctggatggtcatcttggcgaggtagtagcccggggcggacttggcgccgaagatgacggtgcggggaagcacatcgtcggcggagacgcggccggacttgatgtcggcgtacttggcgatcagcgcgaggatcttgagggactggcgcttgtactcgtgcaggcgcttgaccatggtgttgaacatggtgttggggtcgaggtcgaagccgtattcgcgcttggcgtaggcggtgaagtcctccttgttggcctgcttgacggcggcgaacttcttgacgaattcgtcgtccttggcgaggggttcgaggcccttgagcagttcgaggtcgctcagccacttgtcggtgccgaggccttcggtgatgagggcggacaggcgcgggttggcgaggcggatgaagcgacggggggtgacgccgttggtgacgttggtgaacttgtcgccgtagaggtcggagaagtcacgaagggtgacgtccttgagcagttcggagtgcagttcggcgacgccgttgacgtgggagccaccggcggtggcgaggtatgccatgcggaccttggggttctcctcgtcggtgacgatgcgcatgcgctcgatcttggccttgtcacgggtcttggtcttgagttcggcgaggaagtgctcgttgatctcgttgatgatttccatgtggcggggcagcagttcggagatcagcttggccggccagacttccagcgcctcgggcagcagggtgtggcaggtgtagttgaaggtcttggtggtgatggaccaggcggtgtcccagtcgtagccgtactcgtcgatgaggatgcgcatgagctcggggatgccgatgacggggtgggtgtcgttgagctggaaggtgatcttgctcgggaaggtggtcaggtcgggcttgctctggccggggtagaacacgcggatggcgtcgtgcagggacgcggccacgaagaagtactgctgttcgagacgcagcgccttgccctgcggggtggaatcctccgggtagagaatcttggagatgttctcggccttgacctgcggcttgacggcgtcgaggtattcggacttgttgaaggtgagcaggtcgaattcgtcgtagctcttggcgctccacaggcgcagcgtgttgacgcggccggatgcgtagccggggaccatgtagtcgacgggcacggcgcgcacggaccaggccggcttccagaccttcttgccgttctcttcgacgacttcgccgccgaaggagaccttctgggaacggttgtagtcgatgtggccccagggctcttcgttggtcagccagtagtcaggcttctcgatctgcttgccgtccttgtcgaaggcctgctcgaagatgccgtacttatactggatgccgtagccgaacgcgggtacgccgagggatgcgagcgagtcgatgaagcaggcggcgagacggccgaggccgccgttgccgaggcccggctcgtgttcgacgtcgatgacgtcctgcggctcgaagcccaggtccttgacggcttcgtcgaactggtcgatcatgccggcgttgagcagtgcgttacgcagctgcttgcccatgaggaactcggcggacaggtatccgacggccttggtgttgccattgaccatgtcctgctgggtcttgaaccatgcgtcctgcaggtagtggcggaccaccagcgaggaggcgacgtacacgtcggcgggggtggcctgctcgacggtgacaccttggctgtacttcagctgttcgcggatgccgtccgcgaactcggcggtcgtgacaggcgacttgggtgcagtgatttcagtcatgtctgactctctttccggattatgcttcctgtgttattatgcgacggcttggtgaccacgccaataagttccggtgaacgctgcgtaacgttatgcaatcgtttgcagaaacatgaaatatcatacaggatttgccataaatacaccaaatcggctatatatcaaccacattttgagacgacagaaaacgttgccacgttggaaaacaacgtattgcaacacctgatgcaagcccgatgaaacacttttgcaaaaacgcaaagcatccgaaaccgcaccgagaaccgccggccgatgcgaaaaggcaatcgtccccccgagaggcacaatggagtcatggccgcaattcgagaacgagacatacccgcgggcgagcgcgcgtggcagcagtggaacgacgcagcgcagcgactgcgcgaggacggggcggactcggagtccctgatgccggcgctgccccgaccgacatgggcgatggcggtgcgatacaccttatatctgctggagcgcaaggcgcccggccccggcgtggaagtgcgagtcgcaccatggggagccgtgaagatcctggatggcccggcgtccgacccgcacaatctcacgccgcccgatgtcatcgagctcgaccccgaggtgtggctccgtctcgccgccggcatcaccacatggtcccaagagaaggacgcggggcgcatcaccgctgtcggcgagcgcgacgacctgagcgacctgctgccgctctgaccggccgcgggcgcccgtacttaccggccttccggcatgggcggtaccgtcgggctgccacccatgccgacgcacgacaatgcatctgccacccgcggcgcatactccttgacgtaatactgcgcctgcgcatgccacaactcgtagtacttgccgttttcgtcggccacgagctggtcgtgcgtgccatactggacgatcgcgccatggtcgaacacggcgatgtcgtcgcagaacttgcacgacgacaaccggtggctgatatacacggccgtcttgtcgccggcgatggcgatcttctgcgcctcgccgcccgagacttccacgccgttcttgtcgagctccttgtacaggggcgtgtcaagtccgtccggcagcgtcttcaaccggtcgccgaagtcggctttactcaggcagtccatcacgcgctcactgccgtagtgcgcaccggccgccacgttctggccgagcggcagggcgaacagccggaagtcctggaacaccacggcgaagatgcgcatgtattcgtcgtagcggtatttgcggacgtcgatgccgttgagcaggatttgcccttcgatcgggtcgtagagccggcacagcagattgatgaacgtggtcttgccgctgccgttcatgcccactaccgcaagacgggagccgactttgaacttcaggttgacgtgccgcaacgccccacgcgtcctcgagcgcgtttgggtagcggaacgagacgtcgcggaactccacgtcgtactggcggtcggcgcgcttctcggtggtcaagttgtgtgtttctgcaagttggtgtccacagtatgggcactatttttcagcagtgtaggcggctggtttccaacagaaactgcgccgtcggaacccgccgcccttttcttcctggctatctggtcatgagggcgtgctcgctacggtaggagcctccctcgaatccggtgagtcttccgtggtgcacggtgcggtcgatcaacgcggcggccatgttcttgtcgccgagcacgccccccccagccggagcactcgatgttcgtggtgtagaccacgctccgggtctcgtgggaatccgatatgacctggaacaggagcccggagccctcctcgtcgatcggcatgtagccgaactcgtcgatgaccgggagcctcgccctggcgatctgccggggctccgcgtcgagccgcccccgtttcgcgcggcgcagccgcatgagcagcccggtcgcggtgaagaacccgaccggtatcgcgcgcatgcacgcgagcctgcccaacgcgactgcgagatgcgtcttgccggtgtcgacgggcccgtagagtacgagattgaattgacacgccattctggactacttcaatttggcaaaacacacatcagcacggtgtacaccaccaggtcagggaacacggcatgcttccctcgaccggcacggtcggcggctcgtacgacaacgccatggccgaaagcgtcaacggcgcgtacaagaccgagctggtgtggcggcgcaagccattcgccgacctggccgagccagaattggcgacgttccggtgggtctcgtggtggaactcgaagcgtctccaccagtcgctgggctgcaggacaccggaacagatcgaaaccgagtatcatgcaaaccaagcggcacaagccgtctcacaataaaaggggaacagaaatcaggccacttcaggcagcctcatcgcgctcgtcatgctccgctgcgacggactcgacatacacctaccacaaccaagaacctaacccacgaaaacagcagaagcccctcaactcttcaattccactacaaaggtcacatcacggcatacgcacgccgacgcgcgtatgcgtgcacgactccagcaacgagccgtacccgccgttagatggcaggcttcagtatcgtgacgccatgcgttagcgtcaccatgcaacgataggaacacactattcaatagtgcatcatgaaagcgtgacgttgcccttgcgcaggtgccgtaagactccacggacaaagcaatgaggcttcccccgtgagaagggaagcctcatattccattcattctattcagcgatgatgacgccgaatcaccgatcatcctttgggaacagcgcgtcgaaggcatgttccatcacggacttacggcggatcacaccgacgagtctgccatcaccatccaccaccggcagtttcttgaactgcttcttggcgaggattcgggccacctctccaacatgctggtcgggcgtggcggcaacgaccttacgcgtggcgatgtccatcaccttcttgccggagagcgcctgcaccttggaggccacggtttcgtcgtcgaacaccaccatcgtcgaaccggtgccggtggaaaccgtacgggattcataggtggcaatcgatttcatgacatcgccgtcgctgacgaagccgacgagcctgccatcgccgttcaccacgggaaggccggaaacgttgaggcggatgaactcgcgcaccacatgcgtgatgtcatcgctgtccaagcagctgtagggctgatcgtccatgatcccgccgatggactgttcctgggcctgcttgaacagggaggaggcgggggccacgtatgcgccggcgtagtgatgctcggcgtgctggccttcagtggtttcggccgcgacttcggcggaggcttgcgcctcgtaggccttggcgttgcgtgcggccttctccttggcacggctggtgacggtgaagatgcagatgatcagggcgaccagcgagatggcggcgcacagcaggtaggagaacgcaatgccgctggccgtggcggacttcacaccctgggacatgtgcgaggcggtcacggatgtttctgcggtgaccagaagcgaggtcgcaatggctgccgcgatctggcggccggtgttggcgatagcgttgccatgggcgatcatgtcgttcggcaaagcgttgacgccccaagtgttgatcggcatgttggcgatagcctgaccagatgcctgcaatgcgcagaacacggcgacaaacagcactgatgtcttggtgttgatggtgccgagaagaccaagagagatggtcatgagcgcgaggccgccgatgcccacgccgcgcgggccgaatttgtcgaatgcggcaccggcgaccggactcaggatgatgccgaccgccgcggcgggcagcatgaccatgccggtgacggtggcggattggccgagcacattctggatgaagataggcaacgtcacgttggttgcggcgactgcggcgttgatcagagtgaccagaatcgcggagttgcggaagttgcgggtggcaagggtgtcaacgcgcaacaatggctcatcgagcttgacttgcttgtatacgaatgcgacgaaggccacaagaccaacgacgattgaggtaatgacgaccggactggcccatcccatcgtggaagcggacgagaagccatagagcaggccaccgaacgcgatggtcgaaaggatcacggacaggacattgagctttgggttcttcaactcgctgacgttcttgagcatcatcgtgcctccgacaaggatgaccagtgccacgactgcaatgccaatgaacatcaggcgccatccgaaactgtcaatcaccagaccaccgacaaccgggccgatagccgggccggcggccatgacgataccggccatgcccatggcggtgccgcgcttatccggcggatagacgagcatcggcactacggcgaccaatggcaacagcacgccggagccggcggattgcaatacgcgtccgatgagcaacagcacgaaattcggcgcaacggcacacagcagtgtgccgaccatgaaagtggcaagggctccggcgaagagctttcgggtggagaatttatcaatcagatagcctgaaatcggcaccatgatgcccgagaccagcatgtagacgctggtcacccactgcacggtgccggtggtgatattgaaatcacgcatcagtgccggcaaggccggtgacatgacggtctggttgagcagcgcgatgaacgagccgacgacgatcacgcccacgacgatgaatcgggcgtgcgaatcaataggctttacggaactggcggcggacccggattccgcggttttctgtgaggtcacagcatttccttctgttggtaacggcatgtgtgggcgatccggccccatacttgtgtcaagacgcggggacaccgatgagtccggggtaaaggaaaagccgccatccgttccgcattcatatacggcaaacgattcgcggctttgcgtaagttgatggctatggtgagcgattcatgcgacgtcgactgcggatgggccatcggtacatcccggcataaggcgtgtccccgctacaccagcatcgagaatagggccatttgtggattggcaaacagaacattgccgacgaacgacccacggcaggcgtgtgcgatgaacatcgcgtagcgatacaggttcatggcatctccttgatgggtcttcgtacggcagacatcgagaagcctatcatcattcagatcgacggtgaaacccacgcatgcccgacaatacacaaaatctttacaaaaggattgggcttaccgcatacgctccgcctgaatagcggtccgaggatgaatcaggggcgagccaagggttgcgtctcgtgtttccgtcatgatgtctggcaaaaaagtgaagccggacatgcgaggcatcgaccggaatcggaaaggggcaaatcatgcgagttctcggcaatatcctgtggatcattcttggcgggttggccatcgcaatcggatgggcattggtgggactgattctatgcatctccatcatcggcatcccgctcggcattcaagcgttcaagatggccaagcttgcgctctggccattcggagcggaaatcgccaacctgtagattccaaatactacaaagccgccaaagcaacccttgacgaggtggtcaccgacgtcaacaattggattgaccagcaagccgccaaggccgaataataaaacacacattatgctgctgcagcagccagtccttgcagaacaatgtcatgacaaaggcccgagaagacgacttctcaggccttatccgtgccgctcctcagtcgcttgtagcgacagctcccctcaaagaggggagccagagaaacacttacttcgagatgttgaacttgaactcggcgtcttaccggtcttcttcgtcctgccttgccgcggatattcaatcgcatcgcagggttgcatagccataaagcgattccacaaactggcttatagatggcagattcggaaggctgaccggaggcatctcgcctatgtatggcagttcattccagaaagaccgcagttagagggtacacaattaccccctaaccggtctgtcacaaaaacgagctgccacatataagcgaaatacgtccggacgaacgccagaatctgccatatataagaccacctgtcagaaatctaattcaagccgatcagcaaaccaccattacattacccttgatttggtgtatctacaacaccttagttatccttgatttggtgtataattaagcatgttattacccttgatttggtgtatctacggcggtgagacatggaaactttcgaacgaaaagcgtacgaagaactggcttcctggaaggattcttcccaaggaagcacagccctgctcatcgagggcgcacggcgcgtcgggaaaagcaccatcgcggaggaattcggacgacggaactatgcgtcgtatatgctcgtcgacttctcgaaagcccccgatgacgtgctgggctacttcgtcgacctgcgcaacgacctcgacgcgttcttcatgtacctgtcatccttctacggagtggaactgcacaggagggatagcctcatcattttcgacgaggtgcagctgtacccgaaggcccgcgaggccatcaagcagctggtggctgacgggcgttacgactacatcgagacaggctcgctcgtctccatccgcgagaacgtcaaggacatcctcattccatcagaggaggagtcgatccgcctgaatcccatggatttcgatgaattcctctgggctttgggagaaaagccactgtccacgctcatcgcggactcgttcaagaagcgcaggccgctccccgattcgctgcacaggaaagccatgcggctattccgtgaatacatgctggccggaggcatgccccaggctgtgtcgaagtacgtcgagacccatgatttcagcaaagtcaacaacgtcaaacggaacatcctccgactgtacaggcaggacatctccaagcatggcggcagcgaccggatacgcatcacgcgcatcttcgacaacctggtgggtcagctttccaagaaggagaagaagttcaacatcacatcgctgggagagaaagcgaaaacccgcgattacgaggacgccttcttctggctttccgatgcgttcattaccaacgactgtttcaattccaccgatccgagcgtgggcttgagcattagcgaggaccattcgacggtcaaatgctacgccgccgatacagggcttctcactacgctcgccctggccgactcggaacagaccggaagcaacctgtaccgggacatcctcctagaacgcatcgagatcaacgagggcatgctcgcggagaacgtcgttgcacagcttctccgggccaacgggcaccggctgttcttctattcgcgcagcgatcgcgacgacccgtcgaaccgcatggagatcgacttcctcatcgtcgaaccgtacgagaacgcggcaatgaagtacagggtcagccccatcgaggtcaagtcatcgaaacgctaccgcacggtctcgttagacaaattcaaggcaaaattcgataagaaggtcggcaccagatacgtgctgcatccgaaaccgctggttgtggaaaatgacgtggtcaaactgccgatctacatggcgggactgctgtagaaggcttcatgcagacagcgcttttgggtgcactgccagcgaatgacgcccaacacttgcgcgcgcatatgttgtccaccttgaacacatctgtttgccgcccgtcacccagttaaccttccagccacctttcagacatccgctagatactcgttcgtccacagctgaacactaaaatgtacccggtttaattgtacagagcctccaattataggggggggctggccccgttgtctatttgtaagtgcaacgccttcgtcagagttgtaagtctggaagctcgtcggcaaacgcctcggcgggtgtgcggtagccgagcgctcgcatgggccggttgtcggtctcgtcgacgatctcctggagttccctcgccatgcccggttcgatgatcgtgcgtttgggcaggtaacggcggatcatgccgttgcggttctcgttgctgcccgctgccagctggaataggggtcggcgaagcacgtggccatgcccggctcgtcgcgcagccgcgcgtggcgggcgaacccggtgccgttgtcgtgcgtgacgctgagcctggcggccgccggcagcggggcgaacatcgccagccgcgccccgacgctccgctcggcggtcttgtcggggataacacgggccatgaggaagcgggtcctcctttcgacctcggtgtgcaggtcgcatcccatgccgatgacgctgtcggcctcccaatgtccgaacccgctgcggtcgtccgcctccggcggacgctcggcgatggagacccttcgggatagggaacctcgacacccgacggcccgcatgcttgcgccgccggtggccgcgcggcaggcatcgggcccagcgttcgcggcgcggcttgccggaatagatccaccggtagacggtctccggacacacgcgcatggcatcgtcgccggggaacaggacgcgcagcctgccgctgacgggcggcggcgaccagccgcagcccagtctctccgccacccacgcccacagccggtcaggcgacaggcgatgcggcttgcgcgctttggcgcgcctccgggcggccttgcgccgggccggcccggcgatgtaatggcggctcgtccaaggcccggtcttgagccgcttgggccgatagggacggtaggattcgctctcgttggacgggaaccacgtgttgcgtttgatctcacggctgacggtggacgggctgcgcccgatcatcgcgccgatcgcccgtatgccggtcccgttgccgatctcgatctggatgacctggcgttcctcttccgacaggtgcgaatatacttcccccataggtgcaacatcccttccggactggttttctagacaatctccaatctaacggggtgttgcactttcatttagacaacgggccctataatcagctattcacatcgccgtaaactgtattgcacggtcactcagcacaccctgttcgccatttcgatcatttctgatggcgaagtaatagctgttgtcatcattcgtgaacgccaaaaactcaggtttctcggcatctttatcagtctgcgcacgcaacgtgacgaaaatacgatactcaccgttattaaacatgtccagagggattgaatatttcactgtatggtggccaggttcgattggcatgcccttgcactctgtctgtgtatcgacgtcatagacttgtccacttctacgagaatcctgcaaaataattcctagataagcgggaatgtcctcgttaaactcatactcaacagagaattcaaggggcttcttgccatcgacaatcttaggcccttcactagtcacgttaagaaccggaacgcgagaattcaacccatgggggtatatgtattttttttgccccttggtcttgaaaaaatcattgttttgggcgttttcgagactataccggtctgccacgttgcgaggatcgccagagcacacgatctctccattgctgatcagtatggccttgttgcaataccttttcatcgaatccatactgtgcgtgaccagaatgaccgtttttgttggatcttccttcacgctcttgaaaaaggcatcgcacttcttctggaacgcagcatcaccaaccgccagtacctcatcgagcaccagtatgtctccctgagccttaatggctaccgagaatgcaagccttacctgcataccactggagtagttcttcagcttctgatccatgaactcgccaagctcagcgaactcaacgatatcgtcatacatcgcgtcgatttctggacggctgaaacccagcaatgcaccgttcagatacacattttcgcgaccagtcaactcaggattgaacccgacaccaagttcgatgaacggtaccaacttgccacgaacatccacagttccctgttcaggcacataaatctgggagatgatcttcaacagagtagatttaccggaaccattacgaccgacgatgccgaagaagtcgcctcgctgaacatcgaacgtaatatcccgcagtacgtgctgctcagtgtatcctttaatgcccttcgcccaattcaagaacgccatcttcaagccactcgcttgttcagtcggcaatcggaacaccttggccacatgattgacgctaagaacgacggaactctgatcttccacactcaccccatactcactgctcatcgtttacagcacctccgcgaacttagcattgtacttgcggaatatgcgcacacctactaccacaattaacagggtcagcatatatggaacaaacggcaaccacctactatcgagatacgtccatactgttggtatgtattccggagatagcaggttatgccgaatatccatgatgacctgcgtactgggattcagcatgaggaacttggaagcccatgcgaaatccggtgctcgctgagcaatcacactgattggatagatgattggtgtggcatagaacatagcctgcatcagtacatcccagatatgcgccacatcacgaaagtaaacatacaacgtgcttaatatcagcgatattcctaaagccagcaaatacaactgcaacacattgaacggtaccagcagaatacgccatgtatagtgtgcgtgggcaaagaagccgaagcatacgaccacaaccatgttgatgcccagagaaatcatggatcccatggtgttggaagcaacgataatgtagttagggaaatgaaccttgcgtaatagatctccacgatcgacaatgccacgcataccaacggtggtggcctccgtgaaaaaagaccacaagcaggtaccgcacaataaggagatcgggaatgttggcgtgccgtcagagaatttcaggaaccgaacaaacaccacatacatcacggcaaatagcatgagcggtttcagcaccgaccatgccatgcccaaaaacgagccttggtatcggagctggaaatcagttttcaccagctctttgaacaccaccaatgaatagcggtatttatctctcgcccgctgcacaagtttcctcataaacatccaattctagcaaggggtgtatcaacgccagccttggctagcgcaaacacccatcttatgctcttgtccagttttaatagctgctccagaaatccgaagctctgccacctgttccgcgcaatatgtccatccttgtgaagaactcattcttattaaggcattagaacgctaacatagtactcactgacggctaccatatacactatgacccaagaagtgtttactccaaaaaacatcatcgtgaccggcggctgcggcttcatcggttctaatttcgtccattatgtatacaacaaccaccctgacgtgcacatcacagtgttggacgcattgacatacgcgggcaatcttgacaacatcaagccattgctcggcgaccacgttgattttgtgcatggcaacatctgcgacgctgaactgctggacaagctggtacccggacatgatgccatcgtgcattacgccgccgagtcgcataatgacaactcaattgccaacccggagccgttcttaaagaccaatgtggagggtacgttccgccttctagaagcggcacgcaaatacgatgtgcgctatcaccacgtcagcaccgatgaggtctacggtgacctggctcttgacgaccctcataaattcaccgaggaaacgccttaccatccttccagcccgtactcttccacaaaggccagttcggatttgctggtccgcgcatggcgccgtaccttcggtgtgcgcatgaccatctccaactgctccaacaactacggtccgtaccagcacgtggaaaagttcatcccgcgacaaatcactaatatcttggaaggtattcgtcctaagctgtatggcgacggtctgaacgtccgtgactggattcacaccgatgatcactcatccgccgtgtggaccatcctcaccaagggtgtcttgggagaaacctatcttatcggcgccaatggcgagcggaacaatatcaccgtgttgaaggacattcttgaagtcatgggcaaggcccccgatgatttcgaccacgtcaaagatcgtcccggacatgatcgtcgctatgcaatcgactccaccaagcttcagaccgagcttgagtggaagccgcgccatacagatttccagagtggtttggaacacaccattaagtggtataccgacaatcgtgattggtgggaacccgtcaaagccgcaacggaagcgaagtacaagcagcagggtcagtgaacttgtacttgcaccgcttgggaaacgtattgaaactgataagaaagacggaataaatgtcattggaatttgaaaaggaactcaaggtcaccacgaccaatattcctggtctgctggtatttgacctgccggttcacggagacaaccgtggctggttcaaggaaaactggcagcgagcaaagatgacagctctgggacttcctgacttcggtcctgtgcagaacaacatcagtttcaatgccaaaaaaggtgtgacacgcggtattcatgctgaaccgtgggacaaatttatctccattgcgaccggtgaaattttcggtgcttgggtagacctgcgtcctggcgacagcttcggccaggttttcaccacccgcttggatcccagcaaggcaatatatgtgccgcgcggagtcggcaatagcttccaagcgctgcaggacggtaccgcttacacctatctagtcaacgcccattggagccttgagcagaagaagacctacacgttcgtcaatctcgcggatccggagctcaacattcagtggcccattccgctggaggattccgagtgctcggaggcggacctgcatcatccaatgctgaaagacgccaaaccaatggcacctaagcgcaccatggtgttcggtagcaacggcaaactgggacgtgcaatccgccgctatgccgaaagccatgacctgcgcggattcgaatatcacgacaccgatacgttcgatatcgccgatgccgaggcctacgctgccattgattgggatttgtacggcaccatcatcaatgccgcagcattcacagctgtcgatgaggcggaaacgacggagggtcggaagaatgcgtggagaactaatgtccaaggagtaaagaacctcgcccgcatcgctgccgaacatcgcatcacgttagtgcatatctccagtgattacgtgttcgatggcaccaaggaactgcataccgaggatgaggaattcgctccacttagtgtatatggacagaccaaggctgcgggcgacgctctcgtggagaacgtgcctcagcactatctgcttcgttccagctgggtgattggagagggacgcaacttcgtgacccgtatgctggggttggctcagaacaatgcccacgctgaagcaccttccgatcagtttggccgtctgacctttactgatgacatggcgaaagctatcttccacctgcttgacagcaacgcctcctacggtacatacaacatgaccggttccggacgcatcgcgagctggtatgacatcgcacgactcgtcttccaaaccgctggagtcgatcccgataccatcaccgctaactccgtagctgagtatgctcgtgaacaccatgctgccatgcgcccgcagaattgctcactggatctcagcaaactggaagctactggataccatccacagaattgggagcagtctctcacaacttatctggcaaaggagcttgagcagcgatgaaaggtattattctagctggtggatccggcacacggctatatcctcttactacggttacctccaagcagttattgccggtgtacgacaagccgatgatttactatccgcttagcgtgctgatgatggcaggcattcgcgatatcctcatcatttccacacccaaggatttacctaactttgagcgtctcctaggagatggttcacagtatggcgtgaacttcagttacaaggttcagccgtccccagacggtctcgctcaagccttcatcatcggcgaagagttcattgcgggtgagccgtgtgctcttgttctgggagataatatcttctacggcaatggtttgggaaagacgttgcgccgagcggcatctgtgaagcatggcgcaacggtattcggctactacgtggatgacccagaacgctatggcgtggtggaattcgacaaaaatcacaaggcgatttccattgtcgaaaagcctgagcatcctgctagtaattatgctgtgacaggactctacttctatgacgaacgcgttaccgaattcgccaaacaagttcacccttccgcccgaggtgaattggaaatcaccgatctcaaccagatgtatttggacgatgattcattgacggtacagacgttgggccgtggttatgcctggctggataccggaaccatggacagcctgtacgaggccggggagtttgtacgcaccgtacagcgtgcacagggccttcctatcgccgtagccgaggaaatcgcctatgaaaatggctggatcactcgtgaccagttgcttgaggccgccgagaagtatggcaaatctccatatggccagcacctgaagagcgtggcagaagaccggatcatcagtcgaccgtctgatgatccacaacaggcctgattgcgttcttcacaacaattgaattttagtgaggcttctgatgtttttgtgggttagattgcgggttgtggcagtcgtatgtcgagtccgctgcatctgggcatgaccagggcgatgaggttggtgacgcggcggaagccgtaggccatgcggacggtgaccttgatcctgttgttgaacgccccgagcctggcgttggagtagcccagttcgatggtgcgtaggatgtcggggcggcgccgtctgatcttcctggcgagttcgacgatctcggggatgcgcgaatgggacgcccagaacacccggcggttcagttccgtcgtggcttggtcgatcgggtgcttgaacagggtgcgcagcagttccttgagccgtcaggcgcggtagagctggcccctcgggccggtgttcctgatggcgtcgagcgttgcggactgtcggtccgtcaggtcgccggggttcttcaatacggcgtacccgtcgccgccgcgccgcgcctggtcccacaggcgtttcctgaccttccataaggcaagcatccccgcaaaccgacttggccatgcgggattacgcgctcgccatttatgacaaacaaaccaagatctcgcgctcaaacattacgacaaacgtcgagctatccaccgctcgagcaataggtaatataatgatgcgcaagcttaacaattagaatagcctaaagccaaaggagacggattatgttcggcaaagttcgtaagacaagaagcgactgcactgtcggcacgtatgaaaagaagcacgatcttccaaccggcaccattcggaataaggacggacgaaaggcacgcaaggacaagacgcttgcaacgctccgcaaagaaaatgggaaagattatcgctgataaatcggtcgctggtcaacaatgcgcctccttaaaggcacgggcgcagtaaaacgcacaacgatgtttcaagcatacttgttcctcccaatcagggagttcaagaaaaagtcaccagctcgtactgtggacgccaactcgcagaaacacaccacaatcgagcaactgaggtgcgactgatatggcctgttttttgttccgcttttcctctaactcgatgggagatgatggaaccatggcaaagggcgctcgatacactccggagttccgggcgaaggccgtcaggttgctgacggagtccaggtcgtcgtattcgtcggagacgaaggcgatcgaacaggtcgccaaggatccggggatggcgtcggaatcactgcggcgccggcacggccggtcggacgcgacggccgccgtatccgggcagccggccgttggaagtgtattggcgcatggcctcgccatatgcgccatacttccacgggcgggtctgccatcctgtggccgcgttggaagcgtattgcgccacccacagtccgcacttggccctcacatcggagggaatctgccaaatcgcggatgcttgcacgtagactatgggccacacgccggtcatcgcgtgcacgcgccggacgaattctcgtacccagttgccgttgccccatgcgccgttctggtaggattcccaatccaataccagcaccgcgcggcccacgtaagatcgcgtgtggttggtgaagtggttggcttcggcggtggcgttgttaccgccggcgtagtggtagaggccgagtttcttgccggtgtccaacgcgccctgtgcctgtacacgccatgcggtgttgacgaacccggtgttctgggtgaccttggccacggcgaagtcggcctgcacctggcgtgtgatgccggccggctgccagccggacacgttgatgccgttcatgtccaccatcgcggatggcacgaccatgaccatgaccagcaacgccaccagcagcgtggatattcgtttgagtattcgggacatatgttgtccttccgaaggcgttgcgcgagcactggcctgataccaaggcgcggcggtgcttgttccgcgtgtgcatgaacatcacccagcccaccgggatcaagccaaggtccggggcaggcaaacaactgcggaaggttgccgtcgccttgagccgcgtgacagacacggatgccgcggccgcatggcccgcctcctacaaccagtgggggcaaacgtacgacgcgttccttgacgggaagagcacgtacgcggacggtgccatcgccgaccggcgccaacgcctcgtcagagccggacgcatgatccgcgaacgtatcccgcgagaaccacctgttcacgttcctggaaccgaccaggggtcgcaccacgccgatcccggcgacggacaacctcatcgagtcatggaacgggcggatccgcggcatgctccgccaccaccggggatcaagcctgttgcgccgaatcaaggcgacctgccggcggtgccatcaacacgcccgacagcccagaccagcctcatggctcatgaccaacgccatcagcgaccagcagatcgaggaaccctaccgcaaagcatgggaacacagcccacaaggcgcacacgaaacctacggcatccccaaccggtacggcaccggcatcggccggaacgaattccacacccccgtaagataccccaacaccaccgactaaccccatacccccagacacacattttggacaataaccccacatttcccggtatccggcatatatgagaaaaccccggagtgttggcgttccaacgttttccggggattctccatacgtgcgagtggggggagttgaacccccacgagcatacactcactgccacctgaagacagcgcgtctaccattccgccacactcgcagacaaagagataacttaccagcgatacgcggataatgcaattcggcgtgtcgcggtggggcgccgtaagccgtaatgattgtcgcggcgggtgctgcggtgattgctgcggtgacgcccgccgcaagcacccgtcgcagcgctccctcacctcacccgcgcggcccgttcgcatagaagcgggcaagcgactcgtcgcggaattcgtcgaagtaaccgccgtcaatcgaggcacgaatatcgtccagcagctttacgaagaaacgttcgttgtggatcgtcgccagcgtgaacccattgaattcgcgggcgcgcagcaagtggtccacatatgcgcgcgtgtaatgctggcacgtgtagcagtcgcacccctcctcaagcgggccgaaatcgaacttgtgctgggcacgcttgacgttgtagcgcccgtcgcgcgtgaaaatcgccccgttgcgcgcgcaccttgcgggtgcaacgcaatcgaacgtgtcgccgccattctccacacatgcgaagatgtcgtcgaccgaggcgatgcccagcacgtgccgtggccggctttccggcatcgcgtcgcagatccacgcgcacgtgtctgcgatgatacgcttctcgatcgcgccgccgatgcccacgccgtcgaagtccagcgaggcgatctgctcggccgcatgcctgcgcaggtcctcatagttcgcgccctgcaccacgccgtacagtgcctggtacggtttgcccagtcgctcctcggtcagccgctggtgctcggccacgcaacgctgcgcccaacggtaggtgcgttccaccgaggcttcctgatacgagcgcgtgttcatcagcgtcgtcaattcgtcgaacgcgaacatgatgtccgcaccgattttatgctggatgcccatcgagatttccgcggagaaacgatgacggtcgccgttgagcggcgatttgaatgtcaccccatcctcgtcgacgaacgccagtcgttccttgcccgccgcgatcacgtcgtccgatttcatgccggtcacgtccatcgccagcgtcttcttgaatccggctcccagcgacagcacctggaatccgccggaatcggtgaacgtcggcccgtcccagttcatgaatcgcgcgagtccgccggccgcgtcgagcacgtcctggccagggcgctcgaacagatgaaacgcgttggacagcagacattgcgcccccagctcgcgcatggtctccggcaggacggctttcattgccgcctgcgtggcgaccggcacgaaggccggcgtgcggatgtcgccgtgcggcgtgtggatgatgccggtgcggccgtaacggcggccgccacggcctttgccgtcagctgaatcgggcagttgcgtgagggtttcgaaaaagaatgcgctgcggtcgccgggcctgccatcggccgcgccgcgcgggtgctccagaaaactcgtcatacgattactctaggcgatggccgggaaggcgggggatggcgctcggaaagcctgtttcgggctttcccggcggttcgtggcgtatcgttgtctcaagctgtccggctgatgcgtccgcttttcggacgggatatccgcgggtttcagaagaatcgttttgctgctgaccggtcggaaatgtcgcacgaaacaaggccgacggcctgcttcatgataacggtagataattcattctctccttccaatcaacgttcaggaaacatccagagcaggtatctttactcttacgtagagcttggcggcgcgctggctcacagatacgagacccaacccgcctgctgatacttacgaatactgaaggagacaacatggctgacaacaacaatggatactggcccgccgataacggcggccagcctgagcagccgcagaacgacaacctgcagcagcacgctccgacgacctcggatgcgcaggatcagcaattcgcccaggagccgctgggcgcgccgcaggaagcgcccgcgcagaacgacgacgcgcagcagccacagcccgaagcgcaggatacccgtccgacccagccgttggcgcctgtcgcgccgacctcagagcaggcccaggcttccgaaccgactcagccgctgcagccgcagccgacgcagccgctgtaccgcccggcaccggaatacggcgcctacggcccgactccgactcagccggagccccagcagccgcagccgacccagcagcagaatcagaacacgggcaacggcggcaacccgttcttcaacggcaacccgttcatgacgcgcccgacgaacgacgcctcacagcagaatcgccagaacggcaacacgccctacggtttcccgttcggcccgcaaggcccgaacggcggccaggatcagggcatggctcagccggaagacggcggcaacgcgtctcgcggcggaagctccgcggccagccacatcgtgaccgcagtggtggccgccctggtggccgcggcgctgtgcctcggcgttggatacttcgcgctcacctatggttgggtgagcacgccgacgacgacatcgctgaccaacgtccagtcgaacaagtccggtaccggcagcgccaccgccaagacgggcgaggccgccgactggaagaccgtggcgagcgaggtctccggctccgtcgtgtcgattcaggcggcgctgagcaacggcaccgccaaggggtcgggcgcgatcgtgagcgccaagggctacatcgtcaccaacaaccacgtgatctccggcgcccagcagattcaggtgacgctgtccaacgggcagatgtacaccgctcaggtggtcggcaccgacaccaccaccgacctggcggtcatcaagctcgacaacccgccgagcgacctgaaggctgtggaattcgccgactccgacaagctcgccgtcggcgaggacgtcatggccatcggcaacccgctgggctatgacgacaccgccaccaccggcatcgtgtccgcgctgaaccgcccggtcaccgtgaccgatgactccggctccgacatcgtcaccaacgcggtgcagatcgacgcggccatcaaccccggcaactcgggcggcccgacgttcaacgccgccggccaggtgattggcatcaactcgtcgatcgcctccaccgcgacctccagtgattccgccggctccatcggcatcggcttcgcgattccgtcgaacctcgtcaagcgcgtggccaacgagatcatcaaggacggcaaggtcaagcacgtggccctcggcgtgacaatcaccaccggcacggtcgaggcggacggcgtgacccgcgccggcgccaaggtcaccgcgggaacctccggctccgccgtggtgtccggcagccccgccgacaaggccggcctgaaggtgggcgacgtcatcgtggcgtacgacggcaacgcggtgagcagcacgtattcgctgctcggctatgtacgtgcgtcggcgcttaacgacaaggtgacgttgaccatcgtgcgcggcggcaagaccatggacgtcgaggtgacgctcgacaaggaggagtccgcggtgaatggctccggcaactcgaactcgaacaacaaccagaacaaccagaacaaccagaacaaccagaacaaccagaatggcaacggccagaacggtaacggcaatggcaacggcaatggcaacggcaatggcaacggcaacggcaatgacagcaacgggtacggcaacggcgggttctccgatccgttcggcctgtggtaaattccgctcccgaagccgctgacgctgcctgacggctgacattgcccggcagttgacatggctcgatgatggaggggccggtgcgcttgcgccggtccctccacttgtgtctgcggccatgttcccgcgtgacgttggcgtgtcctttcgcagttgttgctagagttagtcgaagacgtggatggcatgtgccgccgcgcaacataatcgaacgaacaattgaatatcgaataatctttttacgccgtgtatcgcctgccctcgccgttttaggcagtgctgccgatgggttaacaaggcgtgggtcgcatgccgttcgtgattccgcgcttgttgctgggatgacggatggtccgtatacgagcgtaaggagatacgatgcgtaagttcatctatctttgcagtcatctgtgtgttcaagtgccgctgttgccgattgccgtgctcacggtcattccgcttgccgtgtgcccgtcatggcgcccgtggggagcggcggatattcctgtactgggcaatcccggcgtgggccagtggattgtcatcatcgtggtggcgtacacgatcatcgacaccgtgcgcggcatgatcgacgatttgcggcatggccgggtcggtgtggatctgctggctgtcgtggcgatcgccgccacggtcgccgtgcaggaatactgggcgagctgggccgtggtgctgatgatctcgtccggcgaagccatcgaggaatacgcccaatccaaggccgaaagcagcctgaccgcgctgatgacggccgcgccccagaccgcgcacgtcgtgcgatggcccggcgtgggcgtcgctggtgtcaacaccggcgacggcagcgatggcagctccgacgaccggggcgacggcttccgcaaggtcgccgctctgccgtcttccgccgccagcgggtcgtccgacgctgcgacttcccactatgacaccgttgccgtggaatccgtcacccccggcgatgtgctgattgtgctgcccggtgaaaccgtgccggtggatggcgagctgttgtccggatccgccacgctcgacctgagcaacatcaacggtgagccggtgccgcgtgaagtgttcgcgggcgcccgcgtcatgtccggagcggtgaacggctcgaccacgctgaccatgcgtgccgccgaagccgcccgcgactcgcaataccagcgcatcctcgcgctcgtcgcggccgcgcaggattcccgcccggcggtggtgaagaccgccgatgtgctggcagtgccgttcacggtgctcgcactggcgatcgcggccgtggcatggttggtgtccggcgtgccgacgcgcttcgctcaggtgctggtgctggcgactccttgcccgttgctgatcgccgcccccgtcgcgtatgtggcgggaaccggccgactagccaagtcgggaatcctgatcaagacacaggacgtgctggagaacctcggccgcgtcacgcacgtgttcttcgacaagaccggcacgctgaccgtgaagcagccgcaggtgacccgcgtcgagatgctgcccggtgccggcactcacctcaatgaggaccacgtactgatgatggcgggcgtggtcgagacctattccgtgcacatcctcgccaaaggcatcgcgaaggccggcacggaagctctgtcccggctgcatcggcggttcgaggaggggcagcggctatgcccgcagcccgatgcggactggcctggtcacgggcgcgattatccggtcgtcaagcacattgatgaagacgccgggaaaggcatctccggcgaagtgaatgggcataaggtgcgcgtaggcagactgtctttcgcggcctcaagcgaagatgggttcctgccggttgagcggatcgtcccgggccgggccacgactgatggagaccggcggtccggaaaacaaggtgaggggcggcttgcggacgagatccgtacccgtttcggcatgctcgcgccggatgaaatggcctcgtacgtgtcggtcgacggtcatctcatcgcccggatcgtcctgcgtgacgtgccgcgcgcgaacgccaagtcggcgctcgcgagcctgcgcggtctcggcgtcgccaagctgtccatgctgacgggagacaagcgatcctccgccgccatcatcgccagtgaggtcggcatcgacgacgtgcatgcggaattgttccccgaagataaggtcaccgctgtcacgaccgcgaccgtgacgccatcgcgcggcgtgacgatgatggtcggcgacggcgtgaacgacgcgcccgtgttggccgccgccgatatcggcatggccatgacggacggcacgtcgactgcggcctcggagtccgcgcaggtggtgatcctgaacgacgacatcgccgccgttccacgggccatcgccatcgcccgccgcaccaaacgtgtgatgctgcaagccgtgctggccggtctcgcgctggccctgatcggcatggttgcggcggcgttcaacttgattcccgtcgtggtcggcgcttttctgcaggaagctatcgacgtggtaagcatcctctgggcgctcaccgcgctgcttgaccgtgactgacgggccgtggtcgacgggcgcagctgggccggtcgtgatcgaccggccgcgcccgtcgccggacgatcgggcgagaacgaatgtgacattcgacaacaatgggggcaatgccgggaaatcccgccgttgcccccttccgtgattcggtggcttgcgataacctataacgcgtgactgaatctgagaacaatgaacttcgtatcgccgtgatcggcgccggtcccgccggcgtctactcctccgacatcttcctgcgccagctgaagaagctcggcgaggagctgggtctgggcaccaaggcccgcatcgacctgttcgagaagctgccggtcccgttcggcctggtccgttacggtgtggcccccgaccatccgagcatcaaattcatcgcatccgcgctggagaagacgctcgacaaccccgacatccacctctactgcgacgtggaattcggcaaggacgtgaccctggacgacctgctggcgcgttacgacgccgtgctgttcgccaccggcgccgtcaaggacaaaccgctgaacctgccgggcgccgacctcgacggcgtgtatggcgccgccaagttcgtcgaatggtatgacggataccccacgggtgcgcgcgaatggccactttcggccgagaacgtcgccgtgatcggtggcggcaacgtggcgatggacgtcgcgcgcgagctcatgcgcaacgccgacgacctcaaggccaagaccgacatccccgacaacgtctacgaaggcatccagggcaacaaggccaaggtgctgcatctgttcatccgccgtggcgtcgcccaggccaagttcagcgtgcaggaactgcgtgagatggagaagctgcccggcgtgcagctcatcatcaacgaggacgacttcgagctggatgacgacacgatcgaagaggccggcaaggacaagctgacgcgccagatggtcgaggagctgttcaccatccgcgagatggccgaagacatggaagacgacggcgacgtcgattacgagggcaaccccgcaaatcgcaagtattacgtgcacttcaactccgctcccaccgagatcctcggcaaggacggcaaggtcgcgggcatccgcgtggagaagaccgagaccggcgccgacggcaagatgcaccgcaccggcgaattcgaagactacccggtcgaggccgtgtaccacgcaatcggctacaagcccgccgaagcgcccggcatcacctatgacgagaagggcgcccacctggccaacgcgaacggcgatggccgcatcaccaccgaggccgccggcggtgacgtgcgtgaacgcctgtatgccaccgggtgggccaagcgcgggccggtcggcctgatcggctccaccaagtccgacgcgttgatgatcgtcaccaacatgctggaagacctcgccaaggcggccgaaggcggccgtgtggccgtcgaccgcgaccccgagtccatcgaccgcctgctcgccgagcgcggtgtcaagccgattgacttcgccggttggaagaaggtcgacgccttcgaacgctccgagggcgcgaaggaaggccgcgagcacaagaaggtcgtcgagccggatcagatgcgtgagcttgctcacgcctgagcgacctgtagcgcgactcgtatacatcgatcaagccgcctcccgcgtgacattgcgggcggcggcttgtttttgcccgtacttgtatcatcccgtgcctccggaatcatttcattgtgctcaaggcgcatatccagccaactgtcagacagtgaatttagtgtgtgggctatggacggtaaattgcatgtgcgcggccacttcaacggcctgaaaacgacgctgctctttgcgttgatgtgggccatcatcatgttgatctggtgggccaccggcggtggccgcggcacgctgggcgtatatatcgtcatcggtctggtctccacgttcagcacgtactggttctccgacaaactcgccatcgcctcgatgggagcccgcgcggtcaccgagcaggaagctcccgcactgtaccgcatcgtgcgcgaactcagcgccaaggccggcaagccgatgcctcgcatctacgtcgccccgaccatgagccccaacgcattcgcaacgggccgcaacgagcgccacgcagccgtatgctgcacgcaaggcatcctcaacatactcaacgagcgcgagattcgcggcgtcctcggccacgagctcatgcacgtgtacaaccacgacatcctcacctccgccatagcctccgcactggcgaccatcatcacgtatctgggatactcgctcatgtatttcggcggcggtcgcagcaacgaccgtgacaactcctccggcgccttcggtctgatcggcgcgctgttgagcgcgattctcgtgccgatcggcgcctctctgatccagatggccatctcccgcacccgcgaattcgacgccgacgaggacggcagccgcctgaccggcgaccccgaagcgctcgcctccgccctgaacaagatctcctacggtgctcaggccaatccgatgccgaaaaccgcgggcacgcagtcggtgtcatccatgatgatcgccaacccgttctccgtgcgcggattctcgaagctgttctccacgcacccacctaccgacgagcgcatcagccggctcatgcagatgtcgcaggagatgcgcaattccggcatcggcggcggcagcagcccgcattacttgtactagcttcgttgcgcaaggctcgcgggcatcgccgtcatgtgatacactgacgacttgtgcataaagcactgcggatgtagttcatcggtagaacgaaagcttcccaagctttaaaggcgggttcgactcccgtcatccgctccgcttccctcaacgataaggctttaaaacccaatcattccaacgattttcaattttgcaggtactcgctcaatcacacgatttttgtcgaattgttgtcaccgtgttgtcacgaggtgtgtaaaagaggattcggagagtggtttgggctcaagagttttcccgtggtcaatgtttctgctgcagtgatcttgctgctgatggatgttgccacgtaatcaagatcggtgtcgaataggtctgcataagtatcccttcttagcttggcttatgacaggatttttctctgaattcagtgctctttctctgaattcagagaaagaatgtataattcagagaaaaattcagagattcagagcaggcggtggcgaatggcgcacgagtatggcaaagaaaccctgtccaaggaattcaaaagtgattgcgataaaggtctgccggattccgaattagtggaggccgttgtcgccttagccaatacggacggcgggtgcgtgtatctgggcgttgaggacgatggcaccgcgaccggtgtccagcgcaagcatcaagatcctgtcgggctgtcagcgatgattgccaataaaaccgtgcctccgatatcggttcgcgcgcaattggtgggtgatggcgtcactgtcgtccaagtcgatgtacccaagtcacatagtgtggtgtcaactaagtcggggagaatcctgcggcgcatgatgaaagtggacggtacgcccgaaagtgtgcccatgtatccgtatgagattgccactcggctttcggatctgggtaagctcgactactccgcccaaccggttccgggggccacgcgggaggatttcgatccgttggagcgcgatcgcctgcgcaagattatctccacctatcgattcagcgaccgtaatcttctggagctttcggacgaggatctggaaaaatcattgcgtcttgtcgtatcggcagatggggatgtgacgccgaccttgacgggtttgttgctcatcggcagtgaggagtcactgcaacgtcttgtcccgacgaacgaggcggctttccaagttctggtcggcaccgacatcaaggtgaataatacatatcgcggcccgctgctcaagaccatagagcagatagcggagtcgttcgctccttggaatccaggaacggaactgaccgtgggtttgttttcctcggtggtgcccgaattcgacgagagggcgttcagggaagcgttggtaaatgcattcggccacagggattactcagttcttggccgcgtgcgtgtgctggtggatgacgcggggctgacgatcgccaatcccggaggattcgtggaaggcatcaacattcacaatctgcttaccgcggaaccgcatggacgaaacccatgcctcatggatgcgttgaagcgaactggactcgctgaacgaaccggtcgtggaattgatcgcattttcgagggggccctgaactacggcaggcctttgcccgactattcgagatccaacggtcggggcgtttcggtgctgctgcctcggagcgcgcccgacgaggcgtttgtggaattattggccgaggaacgcgagcgtagtggcaagtcgatgtcgcttgacggtctgcttattctggataagctcaagcgggagaggcgttgtggctttgacgcgttgtcagagtccttagatatgagtgatcaacgtctgcgcactgtattggggcagttgacggagtctgggctcgtcgaaagctccggcactaacgctcgtcgtacatacacattgggggcgaaagtgtatcggcgcagcggcaaaacggtggaatatgtcagacagtcaggcatcgacagggtgcgttaccccgaattgatcatgaagctgatgcgcgagcagaagtcggtaagcaaaaacgacgtgatggagctattgcatctcgacgagaaccaggcatattaccaattgcgaaaactggttggtgagggacgcgccaaaaaggtgggtggtggtcgcaatgtacgatatgaggaaatgcaacgagacgacgatggaatatcgggcgaacagttctgattagggattatcccctgaatgcataaagctgggattcagcacagcaaagaggattttcatcgactcgttcgtcggtatgcaggaatcgccatggaattgttccatggcgattatccgttttctccggacgctcatcgtccagaccagtttcgctgattctgctccacgattgaagtgtgggcgatccttttgccctctactgatgccgttggaagggagccggcatgccgatatattcattccccgaaccacgctatatttcgggcgcgggctgttcccaatccattgatatgaatatggggttagcaagcgacgtatgtgtggccacacgtgctcgctccacaggtgcgggacggcttgccgggagacccggtccccatggtcggcgaggcctccagaccgctgacacggcttatggaatgagccgttccagctcccgcggggaggtgtttctttatgggctggcgtgacaaccgcaggcgcagcgtatgcaagaaaatcatgttcacaccggaggaatgggagcagactaggagaatccacgagcgttgggcgaggaacatcccggtatacaggcggtggggtgatttcgcccgccagatcctcatgcatggcgcgttgatgaacgtttcggtgacgctggcgagcgatccggaggtgttcaaggccgagctccaccacatcggcgtgaacgtgaaccagacagcccattgcgctggcccgactggtggatcctgctcaccgccaccacgcacccggtctacctgctggcaatagcgccaaagatcagccggttcatcactggcggccagcgatgaatggcaagagcatggaggcatggcggtatctcggcatggcgcaaatgacgaattcttccataacgttcttcaggtccgggccagttgcttatagagcgtatgagcgtctgggtaaatcctgcagggcactccggcgacgttcgtttgacgctccatgatggggtcgtgcttgccatacagcagcagtttgccgggccttatcgcaaaaagcttctcggcgaagagcagatccagttcggattcggtgttcgcgcatcccaatgtgctggtggcgcacatcactccggaaggaacgcagctcaggcatgtgatggtgctgggggaaccgcatctgagattctgcacgattttgacgccgttcaccgccaatgtcgccagatagagctgattaagcagcatgattgcctgctgccattccaggtccatgtccgaagtgacggtgaggtccgagccaacggcacccatataccgcgagtattccgggatgtcgtcgagggccttctccagtcgcgggtatatccgcatgtcactggtgaacagacaaagcacggtatgggaaggattatggacgaatcgcgccttgcgatcccggtacggcaccatgagctccggccattcgtccagatacatctgcggctgaagcatcgggaaaccttgtggattgaactggatgcctttaccgctgagatagtcggcgtagcggtcgatgagctcttcgaatgatgcgatggatcggttcatgccgcccttcccacgttgggaaacttcatgacaaggacgtgcgcccccgggatttcgcatcgcagcaggcacagcacctggcgcaggcgatgctggtgaaactgctgcaccgcctggccttggaaccggggacggcaatcgtcgatcactgcgatttgacggcagccggccagggacgccctgacccgttcccagtccgcctcatcccgaacggcgaatagcaccgagagccagatgccgcgccgcttgccattgatgtcgaacagacagtagggcgttcctgcttccggcatcaggggatcatagggaaccgtctgcgcgacggcgtcggcgggcctgccgtcccagaaagtgccgatgagatcataggtggatttcatgcttgtccctttgcctagagatcgaagacaatgccggtgcccagctcgatagccttgttggcgaactcgacgagcttgcggtagatcgtttcaagccgtgggttgatcggctccgtgagccgccattcaagccatccgagcatgagcttgcactgctcggcgttcaagtagtccacgtctccagggtcgatgagcgaattgcacagcctgtctatcgggccgatgaagtccttatcgaggagatcctcgtccccctcggttagttcgaatgattccgtctgccccggcttcgcttggaaggtttcgggaatatagccgtagtagttgagaccttcaaggctgagaacaaggacaagttccatgatcacatttcccttctcttgagaattttgaagtgggtttctttgttgcttccaggcagaccgttgagcttgacgtttttcttcgttcttttgtcgtatatgcgcagatagcccgccaccatgtccgcgtcgattctccaccgggcgttctcgaacacgtacttgacgccccttctgcgcccctgggcaccgggagtgaaccggctgacaatgtcattgagatcgaccggctgtctcttccaactttcgttccacctcgtctcgcggtctttgcttctgtcgtagcggccctgatccaccatggagccggggacgtcgttgccgatgtagctgcgcgagctgtccgaataccgctgcttgctgtccgacatatgccatatgtcctttcctgcggcgccttgccgcatgccatcttgaagatgcgccagcattgtgagaatgcggcgcgcttcacctgtttgtatgagtgggtgggtccagacggtggcacaatgggatgtgcgagatagtccattgtgggccgtctggaccacggtgcgagaacttgccggttcgcgcaccgttttttttattgcagaatctgtgccgggtcggcctgcttctcatccctcctttccaagaggagtccgcgtgcgtagagttcgaggatgctggcgtcgagcgcttcgtcatcatggcgatggcgcagccagttcgcatgctggttcaggatgttagaagcgcattccagcgaggtgccgaatcgctgagagatttcctcgatggtcgtgagaccgagttcttcgatgagtacttggggcgcgatagcgtatttcgcccagaaattcgcttcgatttcggcaagctcgctgtctcggagatggcctcgcatggtgtgtcccatttcatgcaatttggtaaaacgaattcttcctgagttttcttggagattgcaggcaatgtatcggctgtcattgccgtttgcgctaatcgtgaatgatatgccacttgggcagctgcagagcgtcatcaagtcatccaaggagacagatgggttgaatgcaatctgatagggtatcgtttgaattccgtgtgcatccagcaactctgatgggtcgatgggcagcctgatgtagccgagttgctggaatgcgtccaccacgctccatttcaactcctgataaaacgacgggtcgtcaatcctatatcccgtgatgtcctccttgttcccttgcagtcaacagagtcatgatgagctcccgcgtctccgcttcgctgagatcgccgccgtgcctggcgcagtacgccttgatcgtgccgaacggcgtatcggcgtttgattcgggcaggcccagcagaaattccgatgtggtgtgcagagcggtggctatgttcgcgagcgtactcgacgtgggctcccgctctcccgcaaggtatttcgagatattcggctgggttgtcccggctcgcgcggcgagctgggactgattgatgccatgctgccgcataagcttgcgcatcctgtcgccaagtgccgccgtcatatgatgtcctttgtctttaagcctgcgaggctccttttcaattgcttcacggcaatcaatataccacgattattccaaaaggaataatcgtggtgcaacaactaatgtgctgcaagtaggaaaacgcaagataagtcgttcccaaattgttgtcaccatgttgtcatacaaggctgcaatcaggtaaataaagccgctaaatcactggtatttagcggcttctcagcatcggtcaaggcgggttcgactcccgtcatccgccccaccactttccgctcccgctggcgggagctggctcgcgtcagcgagactgagggtggttttccacctatcagatagctacacgtgccagctccagcagggggctcagttgcccgcgtcccccgtatctcccgcgtcgccggccatcttaatcagctgctcgacggtgacgaactcgtacccctgcttcttgagatcgtcgatgatgccgggaagcgcctcgacgtcctgcgaacggtcgccgccaccgtcgtgcatcagcacgatcgccccgttatgcgcacccgtcatcacggcatcatgaatcgccttggctccgggacgcttccaatcgagcgtatcgatatcccacagcacgttcatgtcgatcaggtcggacgtctcctgccactgcttcttgccgaacgccccgtatggcgcccttagcactttcgttacatgcccggacgccttcttcatgttcgaaaacccggcgatgatttcagcgcgcaacgcgtcgcggctgagtgtcggcatgtccggatgcgtgttggaatggctcgccacctgatgtccctcctccagcatgcgtttctcggcgtccgggaacgacaggcactcctcgcccacgtcgaagaacgtggccttgacgcccttctccttgaggatgtccaggatcgggccgctgtatttgctcggcccgtcgtcgaacgtcagcgcgatgaccttcttcccctccgggcgcgggttcaacggcacgacgatcgtgtcctgcggctcgacggtgacgcctttgtccacatgcttgccggaacgtttcccgacccagtattcgtgcacgccgtctttcccggcctgcttgagtatctgtatcgagccgcctgcgatgtcgatgctttcgccgtgcggcacggtctccttgctcacggtatggtcttcggtcacatcctcgcctgacgtcaccatcaccatgccatcctgcgggatcgtcgtgctgtcgattgcatcccggcgcacggcagcgccgttgatgctgacgacgatcggtttgccggcatgcttctcgatcatgtcgccggccacgtcgaccagattgcccggatgcgcgtcgaaatcgccattgtcgcgcagcagtcgtcccaacgtcatgtcgacgctgactttcatggaagtgccgtttaccgtgatcggtatctgccgccaatgccggtcccacatccaccagccaccgacactgccaccggccaacgccaatatcaccagaatggcgacgaatgcaatcagccgatgccgtcccctgccgcgccgcccgttatcggggccggctccgtactcgccatattcgttcccgcgcgtcttccccgcccggcgcacactgtccccaaacgacagctcttcaatgtactgcggttcttttgtcacgtcctaattttacggaggtgaagatgggagaaaggtgaggaacgggccgcggcgtgcggaggcgatggattccgcccggcggctccggccggagtaacggtggtgccaaatgttgcatggtcgcgggataatgcaggtatgacgattgcaactgccgaacgatacgctgaaatgctggacgccgcgcgccgcggcggatatgcctacccggcgatcaatgtgacgagctcccaaacgctgaacgctgcgctgcagggttttgccgatgccgagtcggatggcatcatccaggtttcagtgggcggcgccgcgtatttttccggtcagggcgtgaacgaccgcgtgaccgggtcgttggcgttcgcggcgttcgcgcatgaggtggcgaagcgctacccgcatatcaccgtcgcgttgcacacagaccattgcgccaagcagtatctggacggttgggtgcgtcccctgctggacatggaggccgatgaggtggcgcacggccgcgagccgatgttccagtcccacatgtgggacggttcgacggttccgctggacgaaaacctcaccatcgccgaacagctgctcgacaagtccgtcgccgcgcgtacgatcctggaaatcgaaatcggcgcggtcggcggcgaagaggacggtcatagcgccgagatcaacgaaaaactgtattccacgccggccgatggcgtgaaggtcgcccagcgtctcggcttgggagagcgcggccggtacatggccgcgttcacgttcggcaacgttcacggcagctacaagcccggcgtggtcaagttgcgcccggaactgttgggcgacatccagcgcgaggcggctcaggccgtggtggacgggcgtatcgcgtccgccgccggggccgtcgattttccgaacggcaagccgttcgctctggtgttccacggcggttcgggctctcgcccggaagagatcgccgaggcggtgcggtacggcgtcgtcaagatgaacatcgatacggacacgcagtacgcgttcacccgtgcgatcgccgatcatgtgttctcgaactacgatgccgtgctcaaggtggacggcgaggtcggcgagaagaagctgtacgatccgcgctcctggggccgcgaggccgagagcgcgatggcggcccgcgtcgtggaggcatgcaagcagctcggttccgccggcaaagccctgaagtgacgtcggtcgccgcggtagatgcaaccgcggctgtcgagttacggtcttccgatatgatggctgaatattggaaaaatgcgtcggcgcgggatttcccacgcaagtgcagggagagactgcaggaacttcaacaaggcaaagacggcaagttgcagccgttcgcgcccatgttgatatgggcgttggaaaaacgaatgcgacggtaatcgcacccgccccagcgcttaccttcgcagtagagggcatacggtaggctgttcccggcggaatcgtgcggatgcggaggtgcagtatgtccggaatcgtgttgatcggcgctcagtggggcgacgaaggcaaaggcaaggctaccgatctgatcggtaccaaagtggactatgtggcccgtttcaacggcggcaacaatgccggccacagcgtgatggtcggcgaccagatgtatgcgttgcacctgctgccttccggcatcatcagcccgaacgtcacccccgtgatcggcaacggcgtcgtcgtggatccggaagtgctgttcgaggagattgacggtcttgaaagccgcggcgtggactgctcccgcctgctggtgagtgaggctgcacatgtcatcgcgccttaccatcgcacgctcgacaaggtgaccgagcgtttcctcggcaagcataagatcggcaccaccggccgcggtatcggcccggcctacgccgacaagatcaaccgcgtcggcatccgcgtgcacgacctgttcaacgccgagcacctgcatgacaaggtcgaagccagtctgcaccagaagaaccagattctggtcaagctgtacaaccgtcgcgccattgacgtggaccagaccactgacgagctgctcaagctcggcgaacgcctcaagccgtacgtcgccaacaccggtctgattctgaacaaggctctcgacgagggcaagaccgtgctgttcgaaggcgcccaggccacgatgcttgacgtggatcatggcacttacccgttcgtcacttcctccaatccaaccgccggcggcgcctgcaccggcaccggcgtcggccccaccaagatcactcgcgtggtcggcgtctccaaggcgtacgtgacccgagtcggcgagggcccgttccccaccgagctgttcgacgaatccggcgaatggcttcgccagcagggccacgagttcggcgtgaccaccggccgtccgcgccgctgcggctggttcgatgcggtcgtgaaccgctacgccagccaggtcaacggtctgaccgacctcgtgctcaccaagctcgacgtgctcaccggtctcaaggagattccgatctgcgtcgcctacgacgtggatggcgagcgttacgacgatatgccgacggatcaggccgccttctctgctgccaagccgatttacgagaccatgcccggctggaccgaggacatttcgcaggtccacgagttcgacgagctgcccgccgcctgccaggcgtacgtcaagcgtcttgaagatctgagtaactgccgcatctccgtgatcggcaccggccctcagcgcgaccacatcatttccgtccactcgcttctcgactagtcgccattcggcgtcctcgccgacccacggctgccgggacaaagtgaatccgcgtactacaagggtttcagatcatgaatcagtctgtaccgttcgtgccctcctcgcatgacgaatccgatggcggcgacgccgccggcgcgggggacatcgaatccgtctctgccgggtccgacgtcgccgacacttccgcgccggactcgactccaagcgaggctcacgccctcgccgcggacgagccggcgccatcgacccaagagatcagcgcctccgaaatcgaatacgcggcgcctcggcccaccggactggcagccgcggtagcaccaccttccattccactggccccggccaagcgcgtgcaggcgaaattcaaccccctcgccgatggcatgctgtatttggtggtgttcgtcggcgggttcttcggcacggcgatacgatacgggctctcgctgctcctgccgaatccggccgcgccaagtggtctccttcattcgttccacaccgccacgttcatagcgaacatgctggcgtgcttcatcttcgccgccctgagcacgtacatgtcgcaggcggcgtggattcgcaagcgcatccgccagctggtcagccgcggtgtcggcatgggcatgtgcggcgggttctccacgttgtcggcgatgatgatcgaggatctgaactcgttgcgcgacgggaacatcgtgggattcgtgacctacacgctgctgagcttcatctgcggtttgatcatcgcgtggcttggcaccatgctgggccttgcgctgagccgaaaacgcgaggcgcgcgtggtggctcgcgcggtgcgcgagtcgcaggccgccggcgttccgtccggagcagacttggctgttgaaagtcaggccggttcggaactggctgcgggccgcgtacaagacatgccagtatccgacgaacagcaccttccgtcgttcgaaccggatccgatcaccgcggaaattccgctcaggcctgatcctgaaaccggggaggtgcgctgacatgtttgccctgatctgtatgtgcggcggcttgggcgccgtgacgcggttcgtcctgaacacgtcgattcaacggtggtggaaccgcgcgttcccgctgtccacgttcatcatcaacgtgctcgccacgttcttcgccggcgtggccgccgcggcctacgtctaccagacggccgaccattcgtcgtacctgctgttcgtcactggcttcctcggcggtttctctacgttttccacggctatcaacgagatggtgtcgctcgcccgcagcggcaaatacgccgcggccgccgtgtacttcatgatgaccgtgctggtgccggtggtgtgtgtggcgctgggttgggggctgatcgcgctggtgcggtagctcgtctgcgctggagtggctctcaaaactcgcagatacaaaaacgatgttgttggaaaataggggttctgtttttgtatctgcaagttttgagagcgtcgttctgtatacaattaggcgaacagtcatattgtgacggcaaacgatggagtggggacatggtcgggatgcgtgatgtggccaaaaaggccggggtgtcgttgagtacggtgtcgctggtggtgaatggtgccgggtgcgtgtccgatgacatgcgcgagcgcgtcgccgaagccatgcgtgcgctcaattatgtgccgaacgagctcgcccgcaacctgtatcatgaccgcaccaacaccgtcggcgtcatcgtgcctaccatccgccatccgttcttcgccacgttggcggccggtctgcagcgagagctgtcggagcgggggctgcgtaccatgctgtgctcgacggccgattcgggtactggcgaggccgagtacgtcgacatgctccgccggcatatgatggatggcatcgtgatggcggcgtacactgagcacgctccggattactggacttcgatcggtcggcccatcgtggggttcgattgttatctcggcgagggcatcccatcggtcggctccgatcacgagcagggcgggcgactgatcgccgacctgttgattcatagtggttcccggcatgtggcgatggtaggcggcccgtgcaggcagttccatgatctggcgcagacgccgactggcgaggcgcggcagacggaatcgcccgggaacaccacgttcccgaccgtgcgctattacctgacgctggagcgtgaactgcagcgtgcaggcattcggtgcgagtacatcgaggccggggaagtggcggattttcagggttgtgcgacggccatgcgcgaactgttcgaccgttttaccgacgtggatgccgtggtcagttccgatatcggtgccgcctgctgcgtgcaggaggtgtttcgccgcggcatgcgtgtgccgcaggacgtgcaggtcgtcgcctatgatggcacgtatctgaccgacatggcagggttgcgtctgaccgccgtatgccaggacttcgatgcgcttgccggcacggccgtcgcccgcatgacggatgccatcgaggggcgtccggtcgattccgccggtgacgtaatccctgtttccctgcgcgaggccgacaccacgcggcgctgattgccgcgcctccgccagcgagtccggaggcggtacctacgccaaccgcttcggcgacggcaccatcgcctcgctcaccgatgtgctgcgcacccgcttcgccggggtgtacgacggtgtcctcatcctgccgttcttcacgccgttcgacggcgccgacgccggctttgatccgatcgaccacaccaaggtggacccgcgcctgggcttctgggatgacgtggccgaactcagcaagtcccacgacttcatcgtcgacgcgattgtcaaccacatgagctgggaatccgcgcagttccaggacgtgctgaagaacggcgagaaatccgagtactacccgatgttcctgaccatgatctccgtattcccgaacggcgccaccgaagaagacctcgccggcatctgccgcccgcgcggcgaatctcgcaagttccgcgctcccaaaagtttcacgtgacgcggccggcatatcggccgtgccacgtcgtcgtgtaatatgcgaacgttacgatagttgtatacccgtaacgagagcgcacaagagaagagaagtaaaccgatatcatgaccgatgatcagcagcaaccgaacgaattccccgctccgaagccgttgccgggcagcgtgtacattcgccctggcatcgatgatcggcctgattacgacaaggtgctcagccccgaagacaagtccgcggtcgctcgcttggctgtgcatcagccgcggcgcaaggtcgaggcgtccgtgacgcaagccgagacccaggtcgcgcagatgacttcggagggatctcccgcggcggccgcggcctccgtcgacacggcggtcccggacatgggctcggcgtacgtggacatgcgcgacccggtggtcagcgccgacggccagcgcccgaaccccggtcaggtgacccgcctgtcgtggggcttcgcggtgggcgcgaccatggcgatcgtgccatgggccgcattgaacctgctcgcgctgcctgcggtcatagcgaaagtcagctggcagcgggtctccggcgcggttgcctcccgcgcggcgttctccggtggcggccaggaactctccgagagcctggtcagtcgcattggcacggtcggcgacggcggggtggcgtcggcatgggccattgatctggccgtggttgttgtcgtgggcgttgtcgtgtcgctgattgccgaggccgtcgtctccgcgctgtccgatcgcacgcgcgtggccgctggccggcgcacgccgtggatcatcgcgggaggcgtcgtttccgcggtgatgacgctggcgctgggactgtgttcgaacgtggtgggcatcgcgttgctgtggggtctggtgcaggtcggttatgtgatgctgaccgtgccgatggcggccgcgttcagcgagcgagtgcccgacaagttccgtccgcgcatcgtgcgcgcgcgtggcgtcggccagatggtcggccaggcgctgggcgtgtggatcggcgtcgcctgcgtcgtgttcggcgggctgtatacgccgttcgccgcggccgccgcggtgttcctgctggccggcatcgtgccggtgctggtgtggccgaaggaaccgtcgagcgaggagcagccgcatacggcgatgagtgcgcacatgctgatggagcggttccgcgcgccgcggcgcgccgtcgaattctggaaggcgttcgcttcgcgctccttggtgtcggctggtgtcggactgacgaccatgttcctgtggttcatcgcatcggcgctgatcttccgggattggttcacgcaaggcaactcctctccgatcgcggtaccggtgtgctcgttgatcgcctcgatggccttggcgacgctcgtcggctccgtgggggccgcgttcatcgccggtccggtgggtgagtacattgaggatccgcggtatctgtcggtcatttcctgcgtgctgtacacggtggcgttggctttgcccatgaccatgccgagcgccgtcagcatggtgctgttcgccctgatcggagggttcgcgttcggcctgatcgatacgttcggccagttgcttgcgatgggcgcgttgccggatgcgcgttcggccggccatgatttggcgttcttcaacctgtcgaattccgtcggtctggcgctcgccgcgataatcggcgcggtcggtgtggccgtcaccggcggtttctcggtgctgttcccggcggccatcgtctgtgtgctcgcgtccgcggtcgtcacgatttcgatgaagcgctagcaatccggccggattggccgctgtcgcgcttcgtttgggattgaggcatcatcctatccgcgattagtcccatccgttgctgctgaaatgggactttcgcgggatggggcgtcgatgtgtctgtctgtaatgcaggcggaacgcagacaggttgtgccgacgccgccgatgttgttatgccgcggccgtccacatagtgaacctttgatggctgtcgtggaatcccgcgcctatgttgtcggacagtcgagcgcgaaagagctcgaaagacacgttcgataccgaaaggaggttcgccgcgatgactggatatgctgctgataacgccgctaacgcaaccaccgttaacgttgttctgctgtctgcacgaattattattccgtcttcgctggcggactgattcggcatcactgcttggaaccccgccaacgaaggcagggctcagcgagcaaccaatcgtatagccctgcacgagtcgcggggcttttttgatgcgtcccacaaggtcaccggatcagcaaagcggcaaacgagagagaacagaataaaaaatcgcgggctcgtccgcgtgcagtaacaggagctaacaatgacagcagtcacactgacagctgacggcaccacttcggtgggtggaaaagcaaaggcgatggtccgtgactcggtcaagaccgtgatcgccgcctcgatggtcggaaccgccatcgaattctacgacttctacgcctacggcaccgccgcagcgaactacttcccgcacatcttcttctccgcgaaggacaaccccaccgtcgcgctgctgatgagcctgctgaccttcgccatcgcgttcatcgctcgtccgctgggatccctgatcttcggccacttcggtgaccgcatgggccgcaagaccacgctggtcgtctcgctgatgaccatgggcgtcggcacgttcctcatcggctgcctgccgacctacagtcaggtcggtgtcggcgcggtcgcggtactgtgtctgctgcgtttcatccaaggcatcggccttggcggcgaatggtccggtgctgcgctggtcgccaccgagaacgcgcccgaagacaagcgtgcgctgtacggctccttcccggagctcggcgccccgatcggcttcttcctgtcgaacggcacctacttcgtgctggagtcgttcaatgacaccgatgcgatgtgtgcctggggttggcgtgtgccgttcctgctgtccgccgtgctggtgatcatcggcctcgtcgtgcgagtccacatggaggagaccccgatcttccgcatggcccaggagcagaagaaagtcgtcaagtccccgctgaccgaggtgttccgcaagtcctggaagcaggtgctgcaggcgacgttcctcgtggccgtgacctacacgctgttctacacgctcgccacctggtcgctcgcatggggcaccaagaccaagcgtgaaggcggcggcgacctcggcttcaccaaccaggagtacctgctcatgctgatgatctccatctgcgtgttcgcgctgttcatcgtgctttcctgcctgtatgccgaccggatcggccgtcgtcgcgtgctgatgttctcgtcctgcgcgctggtcgtgttcgccgtgctgttcccgttcctgctggacagcagtctggtcggtcagaagaacttcgctgccaccatggtgttcctgtgcctcggcttcgccctgatgggcatcgccttcggcccgatcggtgccttcctgcccgagctgttcgacgcgaacgtgcgttactccggctccggcatcggctacaacctcgccgccatcgtcggcgctgctttcgtgccgaccatcgccacgtggctgtcgaagaacttcggcgtgcattcggtgggtctgtatcttgccgtgatggccgtctgctgcctgattgcgttggcgacctgcaaggagaccaaggacgtcgactttacgaagtgacggcgatggtcgggtaccgcccggccgcgtttgaactcccaaaaaacaacaacaatacacaaaaacaatcattcaatatttggacgtgggcaaccacgtcgcctccagtggtactagaaatgagccacaggaggggatgactttggcgcgggacacaatcccgcgtggaagccgtctgcaaccaagagggccgtcgaaagcgagcgcgttcggcggcaagacatccaattaaaggagtgcctattatggcagcaactatctggtatgagaaggacgccgatctgtccgtgttcgatggcaagaaggtcgccatcctcggttatggctcccagggccacgcgcatgcgctgaacctgcgcgactccggcgttgacgtggtcgtcggcctgcgcccgacctccaagtccgtcgagttcgccaaggagcagggccttgaggtcaagccggtcggcgaggccgtcgccgaggccgacgtggtcatgatcctgctgcccgatcagtaccaggccgccgtgtacaagaaggacgtcgagccgaacctgaagccgggcgctgccctggccttcgctcacggcttcaacatccactacggctacatcaagccttccgaggatcacccggtgttcatggtcgctccgaagggcccgggccacatcgtgcgtcgtgagtacgccgccggccgtggcgtcccggtcgtcgtggccgtcgagcaggacccggacggcaagacctggccgctgtgcctggcttacgccaaggctctgggcgccctgcgcgccggcgccatcaagacgaccttcaccgaggagaccgagaccgatctgttcggcgagcaggacgtcctcatgggcggcatcaaccacctgtgcgacctcggcttcgacgtgctgaccgaggccggctaccagccggagattgcctacttcgaggtgttccacgagctgaagatgctggtcgacctggccaacgagggtggtctgaacaaggcccgttggtcctgctccgacaccgcccagtacggcgactacacctccaccgtcatcaccgacgagaccaagaagcgcatgcagtaccagctcaagcgcatccaggacggctccttcgccaaggagttcatggatgaccaggctgccggcgccccgaagttcaaggaactgcaggagaagttctcccacccgcaccttgagaccgtcggcccgaagctgcgcgccatgttctcctggaacaacggcccggccaaggaccaggacgaagccgagtccttcaacggcaagatcgctcgtacccaggttcagtgatcgcctccgctccggctcccgctggcgggagctgccagtcggtcgcagactgactgagagcggtgcataacaaggccgccgttcccgttcattcgggagcggcggccttctgcgttgccggtgatgcggccggtaacgaagccgacattgccgcgtcctgcgccgcgtcacccgctccccgcctgaactgttcatactccaatagtgagatggttcacgttgtggacggtgagggggctgtggcggcgttaccggtaggatagtcctcagttctaaggacaaaatccttaacgcttggatcgaccgggcccatgcccgaacccaaacgcgcggaatgcaggctcctgcataatgcgcaaccacaaacgacaccgtgtgccggcaagagtgccggtacgcaagtaaaggagtgccaaacatggctgcacaaatctggtatgacaacgacggtgacctctccgtgctcgaaggcaagaaggtcgcgatcatcggttacggctcgcagggccacgcgcatgcgctgaacctgcgcgattcgggtgttgacgtggtcgtcggcctgcgcccgacctccaagtcggtcgccttcgccaaggagcagggccttgaagtcaagtccgtgccggaagccgccgccgaggccgacgtaatcatgattctggcccccgaccagtaccagcgcacgatctgggccaacgacatcgagcccaacatcaagccgggcgcggccatcgccttcgctcacggcttcaacatccactacggctacatcaagccttccgaggatcacccggtgttcatggtcgctccgaagggcccgggccacatcgtgcgtcgtgagtacgccgccggccgtggcgtcccggtcgtcgtggccgtcgagcaggatccacgtggcgacgcttgggacatcaccctggcttacgccaaggctctgggcgctctgcgtgcaggcgccatcaagaccaccttcaccgaggagaccgagaccgatctgttcggcgagcagaatgtgctcatgggcggcgtgaacaagctcgtcgagatgggcttcgaagtcctcaccgacgccggttaccagcctgaaatcgcctacttcgaggtctgccacgagctgaagatgctcgtcgacctcatgaacgaaggcggtctgaacaaggcccgctggtcctgctccgacaccgcccagtacggcgactacaccaacacctgcatcgacgagcacgtgcgtgagcgcatgcagtaccacctcaagcgcatccaggacggctccttcgccaaggagttcatcgacgaccaggacgccggcgctccgaagttcaaggcgctgcaggaggagtactccaacgtgcgcatcgagaccgtcggcccgaagctgcgcgccatgttctcttggaacaaggacgccgtgaaggacgccgacgaggccaactccttcaccggcaagatcgcccgcgcccaggtgcagtgatttctgaagctgtgaggccgtaagaccgtagagctgtaaagccaggccttaccgcatgactcaggtcgttgtcttcgtcgttcatcgccgaagacaacgacctttcgtttatctggtcctattaatgtgttcgtaagcaatgtgcttacgaacacattacgagtatcaagggttgctatcacaccaaattgcgtcactgtgtgcgccctcgcacacagtgacgcctgtgtaaaccctttatttttcaacggttctgcagattgcgtcactgagagaggtcgcgcacagtgacgcaatccgcacacagtgacggtcgataaccatggttgtgtcgcacgattcgcatgtttcgtatgatcacgtgcgagttgcaggatccgacgctggtggtatcagcgccgaggctcgttcgctgtcgtcttccgcgatgcccgactcatacgcggcgccctttgcggcgttctctggcgcggtacctacgttgccgctgacgggccgtctcagcacgatcatctgccagcagtgcccggaatttcgggtgtggtctattccggcaggtggtgtcaagggctttcgccaccctttgcgcgaatcgtcgccgcccctgcgaggtcaatatatcatcggcaaagacgacgatgactgtatatcccatcgcccgcaaagcctgcctcttgcgttcgtcccatcggtattgtcgtttgtcgcggcgatgcgcgtctccatcgtattcgatgatgacccgttgtttggggtatgcgatatcgactgtcgcctcgtgagccaactccggaatgagtatcttccagtgtttgaccggctgcggcaatccatgtcgcagcatcacgagagtgcagcggcattccatggtggagtcagtcatggcatcgaggaaaacgagagcatcaatgcatttccttctgcccgggaacgcgtctgctccatcaaggaaccgcgagatattggcgaccgtcatggagcctgatgacgcgcgcagtatggcatccgccagaacgattacctcgatttgcgtgagatacggcgccagcagtgcccatgtcatcagcgggtgcgtgtagacgatggtgatgttgtcgtgagtccatgtgaggtgggcgatgcccgtcaacgatggcgggcatttcaggtaggacgtatctttccgtccggatctcttggttggctccccaacgtacagtacttggaacttcacggcttcaaatcttgaacatagcggtgtctctatgcctgccagacgtaatgcggtcataccggtatagaccggtggcgaggtgttgatggtttttcgtgagtgttccatgcaatgcaggaacgtcgtggattgcagctggcgcagtgagcgcgcaagatagttgttcgcgactgttgcgctggagctgacaggggtgtgctgattcgtattcatggattgaatgtaagcatgataatctgcggtgcgccaccggccgcctcaaatctgtggataagtgtataactcatcggttatccacagtgatgtagcgaatgtggatatgtaactggcggagatgctgcgtgtggtgttgctctgcggatggaggaacgcgtcactgtgtgcggggtgcgtcactctgtgcgccctcgcacacagtgacgcccatgtaaatcccttatttttcaacggttctgcgagtctcgccactgagagagggcgcacacggtgacgcaccccgcacacggtgacgcaacccgcacacagtgacggtattgcgggcttccgccgtgcacgggtacgggtatcggatcatgtgactgatccgatacccgtacccaacgcctcagagcgcctgcgggcgcaggacgagatcgaaatcgaactccgcgtcgtcgaggcggtatttctcgtgcagcttgggaccgcagctgttggacccgacgccggactgcatgtaatccacgcacaccaccgtcgaatccgccggcttcagctcgctgttgtgggccttggcggtcagctcctcctgggtgtaaggcagcgcctggaagtcgaaggcgtggtcaccggcacggagcaccagcagctcggtgtcatcgctggcgacgctcgcccaatcgcagtcgtgatggttgccgttctcctgcggcttgatatacggctcgaacagcgattcgggagtgccggagaacacgccatgatagctggaccggcgcttgtcgatgtagctttcgttcgggccgagaccgcaataggcgatctgccgcatcggcttcggcacgaacaggcgcaggccgaaacgcggcaggaacgggaaatcggtgtcgcgcatcacatgcatgcgcagcgccaccgaaccgtcgggcgcgatggtccagtcggcgtcgatgtcggcgatgcgctgcacaatcggcgccaccagcgccatagtcgcatggatcgtcacctggccgtcgaccaccaccgagccgtcctcggacgtcgctatggcgctcacgttgccggcgtcgacgttgccgtcgtcgaggatcgcatcgtctccaaacgaggcgaccggcgcatcctcatcgtccgcacgcagttcaatcgactcgggcttggcgatgatgtcatcctcatcgaccagtacaccgacctcgtacgcgcgcgcctgagcgcggtcatactgggcgcgaatccaatcggccttgatgtactggtcgttgtcggtgggagcgcgccacacgttcagctccatcggcctgttaagcagcgaccggttcgcgaacgacatcgacgagaacaggccggtacggcggtcgagcacataccggaacgtcgagccttccacggtgatcgaggcatcggtctgcatgacggtcagcgggtctgccagcacgacgtcgtcgtagccggcatccgcggcatcgttcgctccatcgtcggtgccttctacgctatcggtgccgtcatcggcaacgtcgtcgacatcgtcatccgagccgatgccatcggcgatatcggccagcgcggcgacgaccgtctgattgcgcggatccgcggtcggcacggcgacctcgtcgaagccgagctcgaagccgatcggcagtgtctcggtgtccgtcgcctgatagtacttcaccagcatcgtcacgttcccggcctcgggtatggcatcaaggatctcagccggtatgtcgacgaccgcgtcaccatgcggcgcgatcgatggcatcgacggcgtgtaattgccgggatgctcctcccggaacgccgcgcccgccgcagggtcgctctcccacgcagcccatgcggtctccacgccatccaccagcagctcgaacgtcatgaacaccgcgtcggcggcatccaagaagtccaggtaattgtgcagcgtcaccgtgcccgcggccgcgtcgaaaccggtcacgcgcaccggccgatacacgttcttgaactccagcagcccggtatgcggcgtgcggtccgggtacaccaagccgtccatgcagaaattgccgaaatgcgggtactcgcccgaatcgccgccgtacgcgtactcgcgcttgccggccgcgttcgtgccacggtcgatcgcatggtcgcaccactcccagatgaagccgccggccaggccgtcataacgctggatgcgcgtgaaataatcctccagatcgcccgggccgttgcccatcgcatggcagaattcgcacagcacgtacggcttgacgccgttgtcgccgtcatcgccgttgctgccgtcgcgcagcccgtccggcgtgcgcggcccctcctcggagaagtactggtcgatctcctcgacggacgggtacatgcggctgtgtacgtcaagatagctgtaatcgcactcctgtccctcatccacataccgggcgctctcatagtgcgtcaggcggctcgggtcgaaggtctgcgtccacagcagcgccgcctcgaacgtacagccgtacgcacactcgttgcccatcgaccagaagatgatgcttgcatggttcttgtcgcgctccacgctgcgctgcgcgcggtcaacggtcggcgcgatccacgcggggttgtcggcgataggccggttccagcgcttgttgacggccgcgtcgctctcgtccggatgcacgccgcgcatcgcgccgtggctctcgttgtcagcctcggccaccacgtagaagccgagacggtcgtacaggtcgtagaagtgcggcgcgttcgggtaatggctggtgcggatcgcgttgacgttgtgctccttcatcagcgtgaggtcgcgcatgagctgctcctcgttgatgaccgggccggtcaccgggtcgctgtcgtgccggttgacgccgtggagcttgatcggcttgccgttgaccttgaccacattgccatccacgctgacctcgcggatgccgacgagcgcggtgatgacctcgttcgcggtggtgtacacgatggtgtacaggtacggcgtctcggcggtccacagatgcgggtcgtcgactgccagggatgcgtgcgcggtcggggcgaacgcgctgtctccggtgaatccggtgccgttcgcgccgccggcgagcgtgccggtcaccgacgcgatgcgcagtgcggcctgtgcgtccgtggagtcatcgtcgatggcggccacgtcgtcgatcgactcgatgacgccttcttcttcgtcgtccgcggcggtatcgtcgctgccagtgccggtcgcgtcgtcggcttcgctcgcgtcgggctgtgtccgaaccgtcacgtcgtcctcgtccccggccatcggatcatcgatcggctccgaggccgcctctgccaccagctcgccatcctcatcgaacagctgcaccttgaccggcacatccgcatcgtcgaagaacgcgaaatccacgtcgaccgtcgcgtgatcgaccggcgacgcatcatattcgtcatcgctgatgccggcctcaaccagcgcggaatcgacattgcgccaaatcgacgtatgcacgaacatgtcacgaatcgcatacttgggacggtccagcagatacacgtcacggaagatgccgctcatgcggaacttgtcctgatcctcctgatagctgccgtcgcaccacttcagcaccagcacggccagcgtgttcacgccgtcctccagcacgtcggtcacatcgaactcgctggtcgaatgcgacacctgcgaatacccgacgaactcgccgttcacccacacatagaacgccgaatccacgccctcgaaattcaggtacgtgcagggtgcgtcaggatcgggcgtatgcatgaaatcgcacaggtacacgccgcacgggttgtcctgcggcacgaacggcgggtcgaacgggaacggatagtcgaaattcgtgtactggtggcggtcgaaaccatggttctgccacacgctcggcaccggcgtcgtcgtgaagccgtccgccgccagcgcacccgtggcggcagtgcgcggatcggcgttctccggtgcgtcatccccgccgaaatccacgtcatagaacaccgggcggccggcggcgcgcagtcgggagacctcggcgtccaagtcgtagatgctcgcataatacttgaaatcccagtcgccgttcagcagcatgaaacggtcggaattcacgcgattctcgccgaccgtgtccatcggcgtggacgcgggcacgtaatacgcgcggttcggctgcgtgccgacatgtagatggccgagactctcgtagtaccggggaatgaacatgatggagccctccttggttgtgcatgtgccagtgcgatgacactgcacaccattatcggcgtcagcatggtcgagaagtaaggcctttgcctggcttccggcgatattcgcgggtcctggaaaggtggtctcgcgctaaaccaaggaaaatggcggctcgcaaggtttgtggggacttcgttgtgacttgtgttcggcgtgtcggattatggtgggctggctctgttcgcgcgtgcggcggccatggctccatccgctggatgtgcgcgactaagggcggacggtcttgcgcgtctgcgtgacctggtatgcggtcagcagaatcgcaagccacaccacaccggcgatgacggcgacgcgatagctggacgagaagcacatgagcaccacgacgaatgccaggaatgcgagcactacatacggcatcacgcgggcgaacggcagcttgaaatggatgcgtcccagagcctcgtctccggtgagcccggccagctcgccgggcccgtctccggccgccacacggcgacggaaatgaatctcggtgaccatgatcatcgaccagttgataacgccagcaatcgtggcgatcgacatcagataattgaacgcgaaatcgggccacaggaacacgaccaccacggccagcgcggtgatggccgcggaagcgagcaccccgacagccggtacgccgtggaagttgagcttgccgaggatttcgggcgcgttgccctgcctggccagcgagtacaacatgcgggagttggcgtacaggccggagttgtacacgctcatcaccgcggtcagacacacgaagttgaggatgccggcggccgcgtgcacgcccaccgagtcgaagatctgcacgaacgggctggtcgtgccgtcgatcgtgttccacggcaccacggccatgatcacgccgagtgcgccgatgtaaaacaccaggatgcgccagatgatgccattcgtcgcgcggggaatggttctgcgcggatcttcggtctcgccggccgtgatgccgatgagctcggtgccgccgaaactgaacatcaccacgaccaacgccatcaacagtccggtccattggccgtcggcactttgctgcagcaggccgtgggggagtacgccgccattgagcgcgaaccagttcgagaagctcgccttgacgccggaatccgttggcagtccggcaatcagtaccgcgagcccgccgacgatcatcgctatcaccgcgacgatcttgatgagcgcgaaccagaattcgaactcgccgaacttgctcacccccagcaggttcatcgccgcaatcacgacgagaaacaccgcggccgacacccattgcggaatcgcgggaaaccagtagttgacgaacgagccgaccacgctcagctccaccatcgacaccagaatgtaattgaaccagtagttccagccgctcacgaagccggcgcgcttcgaccagtagcgggtcgcgtagtagctgaacgcaccggccctcgggtcttcgaccgacatctcgcccagcgcccgcacgatcatgaagatagccaacccgcccacaagataggcaagcaggattgacgggcctgccaacgcgatcgactcgctggagccatagaagagtccggtgccgatcgcccctcccagcgcgatcagctggacatgccggttcttcaacgatttgcgcaacgccgccggtgccggcgtgttgccggtgccggggcgggaggccgtcgccgtgccgtcgtgcatggtgttcttgctcatcggttcctctccatcgttgccgcacgccggcgactgctcgcggcattggccgtctgcccgtcgttgacccgctcgcgcccgtcttcgacattgccgtcatcgccggtggggccgggccgtgatgccgtgatcgccgcacccgccgcaacgcaggccgatatcggcacgaccgccattctatgccatccgctgacgagtcgacgtcaccgtgcgccgttttgtctcccgcatcggctcatcggggtgcgtcatgccgcggtgggcaccacggtcacggtctgagccttcctcatcgtcgcggcgtcgacttttcgtggctatctgcgtttcaagggggtgatttcgtgttcgccgaacatctatctgagtttcagggggttgccaaaacatgatacccggagtattgagcaccaattgccattggaatcatgcggtcttgagggtgtttatactcggctaccaacccctcgaaacgcagatagatgttccggaagagcgccatcaaccccttgagatgcagatagcccaattttgccgcaacatgtctgcgattgagcgtctagcatcacgtttgcataatcgtgatttactaaatcgcgattatgcaaacgatctgtgccggtgcgaagaatatgtcatgccccgtcgattccttgtgaccagcatctccgattcgtctagtgccgctgcgacactctggccatatgattccgggtgggccgaggccggaatcgtctgtctcaccgggcgccaggcatgcccatggtgaagatgatgtgggcgacggtttctggtggggcggcgagatcggtggcgagccagtactgcagcagtccgatgctgccggatacggcgaaccgcatgcgcatctgcgcttcggccgggtcgctggaggcgggctgcatctgttcggcgacggaacggcggctgtagatcagaccgagcagctgttgctggaaatccaggtcggcggtagggctcatcagcacctgcagatggttgcggttgtcggcgatatagcggcagatgtgctcgatgacgtgctcgacgccggccgcgtcaggctgcatgagcagctggtcgagcgcggtcgtgacccatgccatcgtttcgtcctcgatgtcgtgtagcagctcctcgatgctgtcgtagtgcgcgtagaacgtggagcggttgacgtccgcctgctcgcacagcgccttgatggtgatgctgccgagcggccgttcgcgcatcaggtcgatgagcgcgtcctgcatcgccctccgcgtgtaacgggtgcggcggctttcggtcagttccttggccatggctggtccttgcctcgtatggcctcgcgccggcggattcctgcccgacattcggcaatccgactgttggttgcgaaaccgacatagtgttgttttacttgagtataacatctgttgcgtgtgcggggaggtgcatgatggcgtatatcgagttcgaccgcgtggtcaaggaatacccgtccgggcgcaccacgatccgcgcactggacgaggccagtttcaccgccgaccgaggcgaactgacggtgatcctcgggcagtcgggcgcgggcaagaccacggcgctgaacatccttggcggcatggacaccgccacctccgggcgcgtggtcgtcggcggccgcgacatcaccggactgcgcaaacgcgacctcatagcctaccggcggatggacatcggattcgtcttccagttctacaatctcgtgccgaatctgaccgcattggagaacgtcgaactcgcgtcgcagatctgccccgaccatttcgacccggccgacaccctgcacaaggtcggcctgggcgaccggctgagcaatttcccggcgcaactgtccggcggcgaacagcagcgcgtgtccattgcgcgcgcaatcgccaagaagccgaagctgctgctgtgcgacgagccgaccggcgcgctcgactatgagaccggcaaggaggtcctgcaactgctgcaggacatctgccgtgacgagaacatgacggtgctcatcatcacccacaactccgcgctcgctccgatggcgcacaaggtcgtccgcttccgctccggcaaggtggtgggcgaggatgtgaatcccgcgccgacaccgatcgccgacattgaatggtaggtgctgtgatgggacggcatgcgcataggaacaaaggtcggaaggcggacggtgattctgccgggtggtcgcccgcgtccgatgtgcccaccgaggtgattcccggaatctacgacttggcggccgacaccgatacgggcggcaggccgtctcgtgggcgctcgctgtcgggggcgttcgtcaaggatacgatgcgctcgtggctgcacgggtggaaacggtttctgtccatcgccgtgatttcgctgcttggggtggcggtgatgaccggcatctacgccggttgtcgtgacacgttccgcgccgcgaaccggttctacgacgcgcaacggttgcacgatatccaggtgctgtcgacctacggcctgaccgatgatgacgttgcggccctgaagcaggtccgcggagtcgatgtcgtgcagccggaacgcagccagagcgtcgaagccgacgtcaagggcaccgacaaaaccgtcaccatcaacgagatcggcgtgaacggcctcgaccagccgtacctacaggacggccgcattccgagcaaggctggcgaggtcgcggtcaccaaaaagttcctcgccgacagtggcatggcagtcggcgactcgctgaccgtcaccccggttgacaccggcactgcgacatcgaccgtttcggatacggactccgccgatagcggcgcgaacggcacggaaccgacggacgagcaagccgatgcatcgcaatcggcgccgagcttcccgaccgaactgaccatcaccggcacggtgatagaccccaaggacctgagcaatccggacggatacagcggcgccacggcattccgcaactcgctcgcgtccgactacacgttcttcgcgccgagcgacggcgtgacaggagacatctacaccgctatcagcctgaccgtgagtggctcgaccgacgaggacgcgttcggcgacgactatgacacgctggttcgcgatgtcgccgaccgcatcgaagccacggtgcagaccaagcagcagaacgaacgccggcagactctcgtggacgccgcgcagaagaagctcgaccaggcgaagaccgacgcctaccggcagctcgacgacgcgcagatgcagatcaccgagcagacggaggagctgaaaacccggcgcgagcaggcgaaaaccaccaagcagagccttgaagaccagctcacacagctcgaagaccaatcggagcagctgcaggacggcaaagaccaggtcaacgtgggactgctccaagcccgccagggccaatcgcagctgcagcagggcatcgccaccgcgcagacgatgaacgacctggccgcgcagggcgcgcgggccgcagagcagaccgcggacgcggcagaccaggcggtcgccggcgcgcaaggtctgcccgagacggtactcgaaccattgcgcaaggcagcgaaagccgcgcgcgacctcgccacacaggcacggtccaaagccgatgaatccgcggcacagctcacgcaactgcaatcccagctgagccaggtcaacgccaccatagcccaactcgaagcgcaatcggccaccttgcagcggcaaaccgagcagctgcgcggcggtcgccagcagatccgcgacggactcaagcagatagccgccggcgaagagcagatggacaccggcgaacggcagctcaaggacgcgcaagaccagcttgacgccaagcgcaaggatgccgacagtcagttcgccaagcagcagcaacgcgtcgacgacatcgccgcagcccgctggtacgtgcagacgcgctcgtcaatcggcggcttcagctcgctcaaatccgacatcagctcaatcgaatcaatcggctacgccttcccggtcgtattcctgattgttgcggtgctgatgagcctgaccgcgatgacccgcatggtcgaggaggaacgcggtctgattggcacctacaccgggctcggttacgggaacgcggccatcgcgatgcgatacgtgctgttcgccgcgctcgcctgcctaatcggcggcggactgggactgatggtcggcttcctcggcattccgtcgttcctgctgctggtgatcgagggactgtacacggtgcccggcatacagctcgaatacgattggctgtacgggtcggcaggcatcgcactgttcgtcgtcggcgtggtcgtcgcaacggtcgtcgcctgcgccggggctctgcggcaaagcccggctcaactcatgcagccgaaagcgccgaaggccggcgcgcgcatcttgctcgaacgcatccgcccgctgtggcggcggctcagcttcctcaacaaggtcaccgcgcgcaacatattccgcttcaaaagccgcctgttgatgaccgtcggcggggtggcgggctgcacggcgctgattgtgtgcggcttcgccatcaacgacaccgtcgccacgctcggacccaagcaatacgaggacatctaccattacgacctgctcgtcgtcagcggcgacgacagcgtcgatgcgatgcgcgctcggctcgacaaggacgggcgcgtggaacgttcgctcgatctgcggctcgacagcggcgagatggacgcgggcgacgcaggcgagacgattcagctcatgatcgtgccggatgattcagtaggggcgctcggagacatgattacgctgcggtccgcgagcggcgggcacggcaagctgcagcttgggggcgatggcataatcgtcgcgcaatccgcggcgaactcgctcggcgtcaaggccggcgacaccgtcacgctacgtgacggcagtatgcgtcacggcgaagtgaaggtctccgcggtgacgcgaaacctcatcggctcgaacgtgtatgtcagcgaaagtctgtacaagaagacattcggcgtgtcgacggcggtgacgcgcaacgccgtgatcgccacactgaacggaaccgccgaccagaacatcgcgtacgcggatcggctcgcacgcgatccgttggtcgtgagcgccaccagcaccgacgatctcgagcgcagcttctcgttcgacctgatgagcgccgtcgtggcgctcatcatcgcgctcgcgggcgggctggcgcttgtcgtgctgttcacgctggcgaacacgaacgtgtctgagcgcgtgcgggaaatggccacgctgaaggtactgggcttctacgaccgcgaggtgcaccggtatgtcaacaaggagatgctgatactggccggcatgggcatcgtcgtcggtctgccgctcgggcgcgcggtcggcgggctgcttacggcggcgctcaacatgcccgcgttgtatttcgaggtgagcgtgcactggtacagctatgtgatcgccgccgcggcgacgatggcgttcgcgctgctcgtgcagctgctcaccaatccggtgctcgaccgcatcgatccggtcagctcgctcaagtccgtggagtgagctgaccgccaccgccctacttgtggtatggctcgccggcgttgattttgtaggcgcggtacagctgctccagtaggatcacgcgcatcagctgatgcgggaacgtcatcttcgagaagctgagcctgtagtcggcgcggcgcaggatcgcgtcgtccaggccgatcgagccgccgatgatgagctgtatgtggctttcgccgtgcaatccgagctggttgatgtgcgcggcgagcccttcggaggagagcatcgtgccgtcgatcgccagcgcgatcacataggcatcggggcggatgtgcttggcgatgcgcccgccttccttggcacgaatctgccgttccacgccttcgctggcatgttcgggggtcttctcgtcggcgacctcgatgatgtcgagcttgcagtagcggccgagccgtttgctgtattcggcgatggcgtcgcgcagatactgctctttgaccctgccgacgcaaatgacgctaatacgcattatcctgctttctatctgcccggaggattacggaagatacgccgtcgtactgctccgagagtcacggcacgacgataccgcgactctcagagtccctcggtgggggattggctgacgctccgccagtcaatcccccaccgagggcattggttgatgtgtgcggatacggccgttcaaagccgaaggcgtatttcgtacgtcgagcgctgaggaaaggccgtatacgctccatcaatcaatgacgccgtagaggcggtcgccggcgtcgccaagccccggcacaatgtacgccttttcgttgagtttttcatcgacggcgcagacgacgaccttgaaggcgatggaggggtcgatgtggtcttggacgtattggatgccttcgggggcggcgatgatgttgatggcggtgacgtctttggcgccgcgctcggcgaggtagtgggtggcggtgacgagggtgccgccggtggcgagcatggggtcgatgaggaagcactgacggccggtgaggtcttcggggagacggttggcgtaagtgatctgctgggtggggtgctcttcatcgcgcttcatgccgaggaagccgacttcggcggtggggatcattttggtcatgccgtcgagcatgccgagtccggcgcgaaggacgggaacgatgatgggggcggggctggcgatgtgcttgccgaccatgggggcgacgggggtttcgatgggcttgtcgacgatgtcgaggttgcgggtcgcctcgtaggcttcgagcatgacgagttcggtgacgagctcgcggaaagtggcggatgaggtgtttttgtcgcgcaggacggtgagcttgtgttccaccagcgggtggtcgagtacgtgaagttccatgagtaccagcgtacccggttatctcacattctggatggacgcagcgtgttgcttatgtgacgtagtggtcaggatgtgcagtgaggtcggactgcaggagccgaaggcggtttcgacggcgacgacatcaccaaggccgcgccgaaccagcgcgtccgcaaaggcatggcgttcgtgccgcaggggcagcagtcgttcggcacgatgaccgtcgacgagaacctgcatgtggtcgccgaccggtacgggtccgaggcgaaagcgcggtacgacgaggccgtgacgatgttcccggtgctcaaggaattcgccgtcgaacgggcggatcgctactatgtgctggcctccgggcgcttcatcgccaccggcgaaggcggtcctgcacaggttgaggccgccaaagaggccatgcgcgtataatcgcgctctcaaaactcgcagatacaaggcttttttcgagcgtcaatcgttatacctgcgagttctgagagcgcctattgcagagccttcatcaaagaagccacatgacccttcgcccggacgttgtaacgggcgatctctatcgtgccggctgcgcctgtaacagacacgctgatgacgaatgtcgagcggatcacgcctatgtgcgtgcgcccgtagagcttcttttcgccgtacgcgccgtaaagccgatgcacggtcaggtccgcgtccgacagcagcgggaacgacaagtggtcgcgctcgcggaaacgctgcagcttgtcgattgggtccttggagacgcccagcacagtgaaaccgagtgcggtgagccgggcaatgttgtcgcggaagtcgcatgcctcggtggtgcagcccggcgtcatcgcggccggatagaagtacagcaccacgcgcttgccctgcgccagcagccgcgacagcgtgacggaggtttcaccgccgtccgggttgaccgcaggcaggatgaaatcgggagcgggctggccgggggtgagtcgcgtgggaagggcgggctggctggattggccgggctgcggtgattggtcgcttgcgtgatcttctgtcatgatgcgtgctcctttacctcgatgcccatgtgtgccaccactatcgccgtcgtggtggacagtcgcgcgaccgcgtatagtcgaatcatgcaatggctgcacaggataggcgagacagttgattcgctggctgcatggtggcggcgctcgctgaccgggcgggtgattgaccggtatgtgtcgcggcgcgggccgctgctggcgaacgggctggcatatgggctactgttcgcgttcttcgccggcgtgtggatcgtggtcagcgcgctcggactggtggtgaccgggagcgaggagatgcagaagacgctgctcgcgatgctgcgcacggtgattccgagcgtttcagattcgctgttctccgcgtcgatgctgagtggaatctcgcatacgctgacatggaccggtctggtgacgctggcggtgttctggtggacggtcaccggttggatgaattccctacgcaatgcagtgacgaccatgttcgacgattgcacgcaggagctgaacgtggtcaaggcgcgattgcgcgatacggtcgctgcgatcatggtggcggtactgttcatattgtcgaccgcggcgggcgtcgtctctggcggcctgatgagactggtgttgcgggcgcttggcatcgccgacgattcgctgccgggcgcgctgttgctggaatcgaccggtttcgctaccggcgtgttgctgaatttcgcgttgttcatgctgctgctgcgcgtggtcgcgcacatacgcgcgggcaaattcacgctggtgggggcggcgcttggggctctggcggtcgcggtgatgcagctgctgggcgctcgtctgttgacgggtgcgtcgcgcaacccgatgctggcgccgttcgcagccatcatcggcgtgctcatctggttcaacttggtggcgcaggtgattatgatctgcgcggcgttcatcgccgagtgccgtcgggggggggcggggagagccggagctagctacagccgctgtcagctgacagggtaactggcaccaagcattgccggatacgatatcgtatgagacggctgcgagcttcatcgcaggtcgcaaggtgcatgtctttcatgagatgtgccgtagagcatatgacgagaggggagttcccatggcgattgatgtatatggtgcaacatggtgcggcgactgccaccgtgccaagaacgcgctcgaccggttcggcgccgcttacacgtggcacgacatcgagcaggaggagggcgcggccgaccgtgccgttgagatcagcggccaaaagcacatcccggtcgtgctctatggcgacgggtcgttccaggtcgagccgtccgtcgtggacatccagaacaagctcaaggagcttggcctgctcgggtgagcggtgagtggctgcggcggtggcgaacgatggcgggcggctgatggcgaggtgcggtatcggctgtccgccattgaacacgatgcatcaattcgcgccttatggtcggcgcttttgcaaagtgaggacagcatcgttgcttgatttgaccagattctattcgtaggcagaattcgaattttggtagttgaatggttccgggagtgctgggacagtgaatgatttgacgtggcatggcaatctgccctgttaatcagttagcattatctgccatattttcccgctctcccaaattccgtgatacgccactttccgctgtagccacgatttcggatctacatcttcgcaagaaccattcaaaaatatgagccttctgctgttttcgtgggttaggggatggatgttggtaggtggatgggtgggccgttgcatcggagtttgatcatggcgatgaggttgtcgacgtgtcggaagccgtaggccatgcggatggtggccttgatcttgttgttgaatgcctcgggcctggcgttggagtggtcgggtctgatggttttggggatgtcgtccttgcgtctgcgggtcttcctgcatggttcgacgatctcggggatgcggctgtgggaggcccggaagatccatcgtttcaattcggcttcggcttgtccgacgggttggtgcgggagcgtcctggggagttccttgagttgccatgaccggtagggctggcccctgggatccgtgtcctgccgttcggtgagatcctccgggttcttgggcacggcgtatctgacgccgcgcatcgtctccgtggccgtcttgtcgttgccgcgccgggcctggctccgcaaccgtttcctgacctggtcgggcgcgtcgctcatccgggagacgatgtggaacgagtccgggacgcgctcggcgttcggcaggcgctccttcacgctggcgtcgatccattcggctccgtcgccggtgactgccctgatggaggcgcgctgctcgtcggtcggctgccggaagaacaggccgggcacctccttgccgtatccgtcgtgcgcccagacgacccgtttgcgcttgtggtcgacggccacggtgatgtacgtgtgcccccttcctgcagctggtctcgtccacgcctatcgcggtgggaccgtcgaacatgcacggcatcgaggattccaagcgggcggcgaccctgcgcgcgatatggccggccgtcctccacgcgatgcgtgggaatccgcccgcggtcttctggctggcgaccgccgccggccacgcgcactccatctcgaaaccactggtgagccggctgtccggctccgcccacggcacttgggcggccaccacgccatgctccgcgcacgccacgcgcggcgccaggcccatgagctcgaccccatagcagccgaagtcctggtggcgccatcgccgttcgccgccacccctcccatataacaggcccgtccgctatgaaccgcaagatgaggtccacagcggacgggcctgttcgttcatatggtcggcggtcatggacatgccccatgcctactccggcaacgaggccggaaccggcggtaccgccacgacacggcaactcgaccggtatagggacggtccataacaagttcatacggttcatcgcacattgaacatcagttgaacgacgaatgatatctgatgcgcgcaccatgaacagtgcctgaatcagccatcgtctccgaaaagcggcggatagccttgtaaaggccatgatgcgtaggcgcattgcaacggcacattcgcatcgtcgttgaaataggagagtgctagggagagcctggtcatgcatataggaaagatacgcaatatcatcaaaccagcggtggcgtgcatagcgcttgccgtgttcgccgcgccgggtacggtagtctccgccgcggcgcttgaacgtgaaggtgccccattggatgtggtggccgattggaaattccagcaggcgcattccaccggttccatcgacggtggtgacctggtcatcaaggatatgtcgggcaacggcaacgatctgcacatgcagacctacgggaaaaatgattacaagctcagcgactatgtcaactggtcgtcgaattcgatgaacggtgacggtggtggaagcctgaagctcaacggcgacagcgatctggcgcataagaaggatcatcccgagcagcgagatcccaagggcgcggatttcatcaccgcgagcggcgctcccatcaacaaagagcaatttgccaacggatacaccatggagttcgtgtactaccttcccgatgacttcaacgccggtaccgattcgtggatggggcttgcggccaggcaatccacaaacagcaacatggatgaacacgagatggggtcgatgagcctgtcgatctccaattgcaaggaaacccagttcaaggccgccaacaaggacaatgagtcgaccatgaacaccgatgatcccaacaacggcgtcaccagctggggcgtcaccatggatcacggtggcgtttggtatcacatcgccgtcgtatccgatggcacgaacgtggtgacatacaccaacggtgccaaagcattccgcaatatcaacaagaacggcaatggcctgtatgccgatccgaccgatggtcgcttccgcatcggctcgtcgtattacaacgacactttcgacaccagccaatacaacaaggacgactttgacaagttcctgcgtggcaacctgcaggaggtgagattctcccgcggtgcgctggcacagggcaactggatcgtgcccaacccgaccgagtatctcaaggattacggtaccaacgatcgtttcgtgctggacaaccccagcgtacatacgatggctttcttgccggacacgcagaatgccatccgttgggtgcccacggtgatggaccgagccatcgaccagttcgattcggaagattccagtcttaatctgaccaacatcgtgtccctcggtgacgtggtggataactgggacagtgacgcgcaatggcaggcatcgtccaaggtgttcgggcgtatgcagaaagtgggcgtccccttcctggagcagccgggcaatcatgattacaatggaggcaggcatggctacggagtgcccagcttgcgcaaggcggacaattacctgaaacacttcggacccgactccgatttcggcaagtatcagaaagaacatggttttgcatactcgcccgatggcctgtcctcataccatctggtagacaacggctcctacaagtatctggtgatgaacatcgacatgggcgcggtggtcagcaactcgtcctcggcaagcaatgacgatatgcgatggttcgagcaggtgctcaaagaccacccgaacaacccgactgtggtggtgagccacgatatcttcaagtgctccgattcacgtccgaatgaaatctccctcgatgacgattccggatacaacggtgaagccggtgacgatgaaggtgccggctcgaaaatctggaacatcgtgaaacggtacaaccaggtattcatgatgtactccggtcacaatcacggatccggacaaatgaccctgaccaatgacgccggcaatccggtgctggggctgttgtccgactatcagttcgcgtataacggcggcaatgcgttcttccagtacgtcggcatggatgaagcgaacaacaagatcaccatgcgtacgtattcaccatactcggcatcgctgcccgcggccgagcgttcgttcttcgatgtcaactccctgaccggtgtcggcaacacctatgacggatcgttcgatttcgccaaacgattcgccggttacgaacattcctccggttatgacacgcagcagtcggtgatctccttggtgcgcggcatcggtgcgttgaatggtcagacgccggcgagcgaagtacggcaactatatactgctctggccgcattgccggataatgtgaaagcgcaattcggtgatccgtcggatagtggctctctggcaggcagactcgccgccgcatacaatgccgcgttccccaagccggaacagcccgacaccaagcccggtgccggcaatcagactggaagccaaggtgggcatcagggtggacagtccggaagccaacaagggcagaagggcgatggccatggcaaggggcagacgaatgccggcccggaggcaatggcctccactggtgccgatgtggccccgatcgtcgttatcgcgatgatgacgatcttgttggccggcgtgcttgtgctcgtgaagcgtaagcatcacctttcgcactaaccgattaccggtgtgcaacctgtcgacgagcgagcagccaatagctgggcctgatatagaacccgcggtactggttgctcgctcgtcgaatcaaggaaaaccgaagcacgcttcgcgccaatgccgaagacgccgatggcttgccgtgtcgccacctgcgcattggcgtcatgattgtcgtgatcgtggcctacgtgatgttcggcccgtttcgcggcgacatcgttctggtcttcggcgcgtcggcgatcttctacgtttccggtacgttcgcgtttccggtacgttcatcatgatgacggtcatcctttccctgaccggtcccatcgagcacggtcaggaagagcggcaagccatcgaggtcggaaccggcggtgtgtcacctgtcggtcaggagcctccatcaactagtatcagctagtatccgatatgaagccgtggcctcattgccaatcgccaagggaggaaaccgtgcgcgcgcgacgtgactttgcatggccgaaactgctgaccgcggacggacgcggcatcgccttcggcggcgactacaatcccgaccaatggccggaggacgtctgggacgacgacatccgcctgatgacccaggccggtgtcaacaccgtggcccttgccatcttcagctgggaccgcctccaacccaccgaagaccattgggattttggctggctcgatcgcatcatcgacaagctcggcaaggctggcatcgcggttgatttggcatccgcgacggcgaccgcacccctgtggctctacgaaaaccatcccgaagtccttccgcgagacaagtacggtcatccggtcaacgccggctcccgccagtcctggagcccgaccagcccggtgttcaaggaatacgcgctaaccctatgccgcaaactcgccgaacgctacggcgccaacccatatgtgacggcatggcatatgggaaacgagtatgggtggaacaatcgcgacgactactccgacaatgcgctcgaagccttccgcgcatggtgccgccgcaagtacggcaccatcgacgcacttaaccaggcgtggggcaccacgttctggggacaggagatgaccggtttcggcgaagtgctcatcccgcggttcatgggtgccgattccatggtcaaccccggccagaagcttgattttgaacggttcggcaatgacatgctgctcgacttctacaaagccgaacgtgacgcgatcgccgaaatctgccccgacagacccttcaccacgaacttcatgatctccaccgaccagtgctgtatggactacgccgcgtgggcggaggaagtggacttcgtatcgaacgaccactacttccacgaaggcgaatcccatctcgacgagctggcctgctccgacgcgctcgtggattcgctggcgctcggcaaaccgtggtacgtcatggaacattccacctcagcggtgcagtggaaaccgctgaacacccgcaaatgtaaaggggagacggtgcgcgactccctggcccacgtggccatgggcgcagacgccatcaacttcttccagtggcgcgcatccgcgttcggcgccgaagcgttccattccgctatggtcccgcacgccggcgaggacacgaaactgttccgtcaggtgtgcgaattgggcgcgacgttgcgggcgctcgccgacgccggtgttcaaggcagcggattggcggcatcggacacggcgatcctcttcagcgccgaatcggagtgggccacccgatccgagacattgccgagcatgaaactcagccattggcatgatgtgcgtgactggtaccgtgcgttcctgaacgctggtgcacgcgccgacatcgtgccgctcgcctacgactggagttcctataagaccatcgtgctgccgaccgtactgatactgagcgacgccgatacgcggcggttggccggtttcgtacaggccggaggccgtgtggtggtcgattacgcgaccggtctgctcgacgagcgcttccacacgtggctcggcgggtatcccggtgcgggcgatgggctgttgcgctcgatgctgggcgttcgtggtgaggaattcaacattctcggtgctggggcggaaggcgagccgaacgagattcggctgacgggcaccggggattcatccacgatggacggtgccgtgacccgcctgtggcagaacgacgtgaccgtcgccggaccgcatgtgcaggtgcttgccacatatgccggcgaagaagcggatgagtgggagcttgatggcacggccgcgctcacccgcaacgcatacggcgcgggggaggcgtatttcctcggctgtgatctgggcgtgagcgacctgacgcgattcgtgagcggctggcttgccgtgcagccgcaatcctcccgtcagccgcaggtcaacagtcagtcgcaatccagccgtcagccgcaagtcgtcggcgcgacccctgatgttctgcacaccgtgcgtcaatccgacgacgccatattcgacttctacctgacacgtggcagatcggatgtcgaactgcgtggcatcgccggggagccgatcgtcctgttccgggcggaacggggcagtgacggcggtgcgtatacggtgcatcgcaatggcgttctcgtggtgaaacgcccgaacccgtcgctgtagtcaattgcggcgaaacaagggaatgggggcgcggatggttttgggaaacggtccgcgcccccctacagagattccggtggcgactggctgtttccggctctatttcaacgtttttggactgccgcttaagtgcctggccgcttaagtcgccgctccttcggcgtgccgcgacgggccgaaacggatagttggtgtagcagggcagcctgaggttgtgtcttgctggtttgggaaaatgatggggaaggaatttggccgatactctggtgcagcgaggagtgggccggggagggggtcctccccggtgttgttatgcggcgttggcgaggaagatgtgcttgtggtgatactcgatgaactcatgcgaaggttggctgattgccggcaatgagatctcatgtccatcgaagtcatagagccatctgtcgttgatgtcggagtgccgcaccttgtcatggttgaccatgatgcggtagtcgtcatcgatggagatgaggccttggtcgaaggcccgatcatggaaggcgttgagcaacagcccattcgatgcggcggttttctcgttgggcgtcgatgccttccaaggtttgatgtgactggcgatcagtagtttgggaatctgcatgccggttatgcagcatgtgccgtggtagttctgcaatagtgagttgcggaaataggattggttgacccgctgaagcatggttattggtcgttcctctttggtgggtgcgtgttcgtcgatgagcagggctgttgctgtttcgagcggcgaatgacggtcgggggccagaggggcggggggggggaagttgcttgcgttcgcttgcaggagtgcgcgtcgcagcacatccaggcactgctccatgaatgcatcggggtcttcggcataccattgccagacttgggaatcgagtttactgccatgcttcatacccacgcgaccgcaggccttgcggttggcatcgtaggctgcgatgttccagatcttcaatgccactgagctgggagtgcggtgcaggaatgatgcaagacgctgcacgtcaagccctttgtcatcgcattctcgcggttcgagcacgatatacaaggcgaacgccatcatcgtctcttctcgtgaccaattacggcgaggtgctgatgagctgacgtttattgccatgaaatccaggatagttcggaatggctgatctgattgattgatttgtatacgtatctatcagaggctagtttctttgccgtccaatccgttttctctgaactcaggaatctttctcggaattcagagaaagactgtataattcagagaaagattcagagaaatgcaataggtggtgaacggcgaatggcgcatgagtacggcaaagagacgctgtccaaggaattcaaaagtgatctcaagggcttgcctgattccgaattggtggaagccgttgtggctttggccaacacggatggcggatgtgtgtacctaggcgttgaggatgacggcacgccgaccggtgtcaaacaaaagcaccaagaccctattggcatggccgcgatgattgccaacaggaccgtaccgccgatatcggttcgctcagaattggttggtgatgatatcaaggttgtccaagtcgaagtgcctaagtctcagagcgtggtgtcaaccaagtctgggaaaatccttcgccgcatgatgaagatggatggtacgccagaaagtgtgcccatgtatccgtatgagattgccacccgtctttcggatctgggcagacttgactattccgctcagccggtgatggagtccacccgggatgatctcgatccattggagcgtgaccgcctgcgcaaaatcatcgcttcctatcaatccagtgaccggaatcttttggagctttcggatgcggacttggataaatcgctgcgccttgttgtgtcggtcaatggtgagctgacgccgactttggcagggttgctgcttatcggcaacgaagaagcgctgcagaggcttgtgccgacgaatgaggcggcttttcaggttcttgtgggtaccgacatcaaggtgaatcagacctaccgtggcccgttgctcaaaaccatagaacagatagccgagtcgttcaagccctggaatccaggcacggagctgaccgtgggtctgttttcttcggtggttcccgaatttgacgaaagggctttccgagaggctttggtcaacgcattcggccacagggactattcgcttcttggtcgtgtgcgggtattggtggatgatgccggcttaaccattgctaatcccggtggattcgtggaaggtatcaacgtccataacttgcttactgcggagccgcgtggccgcaatccatgcctgatggatgcgttgaagagaaccggtctcgccgaacgtacggggcgcggcatcgaccgtatattcgagggtgctttgaactatggccgtcctctgcctgattattcgaggtccaacaggcgtggagtgtcggtgctgttgcctcgtagtgtgcccgacaaggcgtttgtggaactgctggccgaggaacgtgagcgcagcggcaagtccatgtctctcgatggtctgcttattttggacaagctcaagagtgaacgtcgttgtggctttgatgtgttgtcgggctctctggacatgagtgaccagcgtctgcgcaccgtactggggcagctgacggaggcggggcttgttgaaagcgctggcgttggagctcgccgcacgtatatgttgggtgcgaaagtgtatcggcgcagcggtagggcgatggaatacattcgccaatcagacatcgatagggtgcggtatcccgaactgatcatcgagttaatgcatgaacagaaatcagtgagcaaaaacgatgtgatggaattgctgcatcttgaggagaatcaggcgtactaccaattgcgaaaactagtccttgaaggacgcgctaagaaggtcggcagtggacgcaacgtgcggtatgcggcagtacgttgaatgagatacgcagatcattcttgaacggttttctctgaattccgagatttatctctgaattcagagaaagaatatcggaattcagagaaaactagtgtgcgatgtggctattccgcttcaggaattatgcacgattcgaacgtggcctgtatctgcgatgccgtcagccgctttatcggtatgctccctatgcggggcttgatgtggttcccgtagctgttcccatagcgcgtccttgtgctgtcggcgatgttccagatagttcacgtcatgctcccttgcgtgatgattcacatgattcgcgtcttcatggtagcgtctcccgccggcgcatgagtgactggtcacgctgtcagtggaatctccccgacggatatcccgcctatgcgggatatccacgccggcgtacggagattcgcatgttcgggcgtacgatggacccggtttttgcaggatgcggccaacgccttggatgggcatgggcctgcaaccatcgtgagccgccacgggcgttcggcgatcgccgggcggcggatcgagaaggatcgggcgatcggggccgcccgccatccgaaaccatcgtcggcgtcgcttcagcggggcatgccgacggttcgcgttttccggcaaagggtcggccggcgctttcctcattgaagttcgacgggtcatggtcccgccgtgagggttggaccggtaatcgggtgatgccgaacgtcccgacgggacggcggccgtgtcatcaaagcgaccgcacgaactctccgcccggaagcggacggcgctgattttggatgacccatcggccgtggcattcccgggcccggaacatgccatggggtttgcggaccccgggcgatgccgcatggccttcccgttcccgcgccacgggcggcggcatggttcatggcgccgacggtgggtccgtccgcacgcggagcgcttccatgcctcgctgacggatggtggcgatcccccccccacggagaggagtattgtttcatttgtagataacattgttacacagtaggagaacattgatatgcaatctgaacgttcgttgattcccgcccccatgccggtccggagacacgcacggtccgggaacagggggctggctctcaccgccctgtgtctggcggtgctgctggtcgtgatggacaacaccatcgtcaacgtcgcgattcccacgatgagcgacgcgttgaacgcctcgtccacggacctgcaatgggtggtggacgcctacacgctgtcctttgcggcgctgctcctgcccgccggcaaactcagcgaccgatggggaagaaggcggatgctgctcgtcggattggcgggattcgccgtggtctctgcagccacggccttctcctgggccctgtggcagctggtgacgctgcgcgtggtgttgggggtctgcgccgcgctgatctatccggcgacgctgtcgtcaatcatcgtcatcttcgaaggctccaggtaccgtagcctggccgttggcctgtgggcggcgacatcaggggtcggcatcgccctgggcccgatcatcggcggcgtcctgctggagcactatgcgtggaattccattttctgggtgtgctccgtcatcggcgtggtggcgctggcctgcatcgcggtggcggtgcccgaggtacgggcgtaccgttccgagaggttcgatttccccggcaccgtgttatcggtggccggcgtgggcctgctggtgtgggcgatcatcgaacgcccgacttacggctggctctcctggcaggtcataggcggcatctgcgcggccctgatcatacttgcggtgttcgcggcggtcgaggggcatacgcacgccccgctcatcgatgtcggcctgttccgaagggccacgttcacgagcagcacctgcgcgatctgcgtcgcgttcttctgcctgttcggcttcatcttcatcaccacccaatggttccaggcattgcgtggatacaccgcattgcagacggcggtcgcgacgctgcccttcgcggtggtcatggcggcggtcgccccgctcgccacgcaattggcgaaacgtttcggataccggtcggtcgtctcgacgggactgctgttcctgtcggcgagcatgttcgtggtcacgcgtgtcgacgcccattgcagctactggttcgtggtcgtacccaccatggccctgatggcggccggcatcgccctgatccaagggcccgccacggacgccctgatgagcaccgttccggaaagctcgaccggcgccgcatcggccgtcaacgacacgatccgtgagatcggcggcacgctgggcgtcgccgtcatggggtccgcgatctcctccgtctaccccgacgagctctcggactcgttgtccggactgcagatcccgtcttccatcgcgaaagccgcggaggattcggtgatggccgcgaaatcgatccttccacacctgccggcaggcatccgacagaccgtggagcagtccgtctcgaccagtttcatgagcgccacgcatgcggcatgctggatcgcctgcgccctcgcattggcgttcgcgctgctctgctggatcacacttcccaaacacgattcaggcaatctcccccaatagaaaggagcatccatcatgaaagacgacggacggatcccacggatcaaggacacggatatgacggaccgtctcctgatggccggcgcgatagcggaggacacacgcaaccccatcggtgacatcgcggcatgcttccccggtcacggcagccagagcgtcgacatgttccacggctgcctgtccggcttccccgaagcccggcgtctggattggcaacggtgtgttggacggtttcttaggggacgagtccttgttcggtgaattcgttggggctccggtatgcgagggtggagtggagtctttggttgtcggaccgccacacatagtcgtcggggtcggagcgtagttgttccaggctggtgtagtggttccggtatatgagctccttcttcaggagcctgtcggtggattcgaccacggcgttgtcgtacgggtcgcccttccctgacggcgatcctctgatgtcgaacacgtcgagcagctcgtcgatcctcgcgttgtcgaacccgccgccccggtccgtgcggaacacctccaccccggtcagagggaagtcgagcgtggcgaacgcggccatgaccaggtcggcggcgcggcccgtgtcggcgccgtggccggcgatgcccctgttcgccaggtcgatgagcgggcacgcgtacgcccactcgccgccgacgcgcacgtacgtcaggtcaccggccaggtgggcgcgcggcccgtagccgtcgaactcgcggccgaggatgttcgcgagcccggccccgtcggcccgcgtcctgtgcggttcggacgttctgcgcgcgtacgcgcccgccatgccccgccgtttcatgatgttgacgatgcgccttccggaggcggtgacgcccctccgctccagcgcggccttgatcttcccggcgccgcagcgcccatggccgtcgcgccggaccgcgcgcacgtcgccggcgatcggatccacccgcccggcttcgggatgcacggtcatccggtagcagacggagcggggaacgcccggcatcctgcactgcaccgatatcggacagcgggaggcgtcggcccgcatcactgctaccttcgtgcgaataccggcgccgcctgttctgaaacgtccacctccatctccaactgtccgttgcgcctgcgcagctcgaccggctcgttccgctcaggggtgcggttgtcggcggctttcgcggagccgctgtcgcggatgccctggacccaacgctgcggcgtggaacgcgagatgtcgtactcgtccctgatctcgcgcgccggcttgccgttctcgtaaagccgcacgatccgccgcttgaacgactcctcgcagtggcggggatgcctcgggtcggccatcgtcggcctccaacctcatgtcaatcgtcccccatcgaactgtctaacacattgtagccaatccatgcgggagctccgcattctgaaggacgccctgcggcaccaccggtagccgacggggatgcctgacgtgcgtgcgggacgatgccacggtgccgccgtcccacacgccgacggcatcatatgcgcgatgccccggcatggcacgcggcgggaggacggcacgcccgcgccggccagcgttccccgacatgtcttggctcggtggcaatctcaatgcggtgggactagccatcacacccatcgaggcgcggtccaagagcgtggctggaccttcgaccccacccatcatgggacggtgcagggacctatgggccggatggcgtttttcatccgtaacggcgggatgatgcggagaagcatatgaggactattcggaaaatgacaaaaagccagcggacgcccaccaccgagatcaggggcctcatactcgacgcctcgaaacgaatcatcgaagaggacggctatgacgccttcaccatccggcttctctcggaaaaggcggatgtgtcccccgcgagcatctaccggcatatcggcgacaagcaggccgtcatcgacgctctcatcgacgacagtttccagacgttacgggagaagctcctgcgcgtcaccaccgaggatcccctgcaaagactctacgatgcgggagtcgtataccgcgggcacgccaaggcgtcgcccggcatctacgccctgttgtggcgatggcatgcgggcgaggcttcggaggcatgcctcgccgccatgaccgagctggtgcgctacgggcaggccgcgggaaagatccggagggatgacccgcacctcatcgcatggtccatatggtccgccgtgcacggattcgtccaattcgagacacgacccgaacatgatacgcccgtcgacgatgacgatgcggcctattcctttctgctccggctgctcattcgaggggtccgcacccctcagacggtctccgagggaacggcgaccatcgcggataccagccgatcgtagaatcgccattggccgcgcaacgccacatcccgtctcacagcggcgaacgttccatccgccttcaggctcacggataccttacggaagtccccgtcccgtccaatgcggacaacgccttcgaggcggcctccttcgcgcagaaggccgccctacgttccaccgaggagaccatacgcaatgatgcgagctcttcggaagagaacacgaaccgcatgatcccgtcggacaatccgtccgaatcgtccacgtccactcccacggcacggattctttccgccgacgccacggcggcgacgcacagcgacggacaatgcgacagcgatcccacgatgccggacggccagagcggttcaccatccgaacctttgagtatgggcccgtcatggccgatacgtcgtaaggcctcgtgggccaaaagacgcgtctccgtgaattcccttcttcgtttggccgtggcgttcccgaccaaggcccgctcaccgtcgaacaatcgcacgcggcgcgtccccttccccgagatcagcacctcgcagccggaggcgagcagcggcccgaacaggcgagcccgtcgcatcatgaggtctgcgcacatcatggagactctatataccgaaacccacaaacccagcaacagcaaggctttctaccaattcccagaatgagtgtaccactctgttcgccgctcaaagcccgccagaaggaaatttgcgcttttccataccttcacgccgacaagaggtgtcacgattacctatatctcccatactttctatgttttcttgtgtaggaaaatgtaaaagtgtaaacaccgtcggaatcgacggagacgttctcatatgacacgccgatcgatcatcgaatgtcatgagtggctcccttcagacatagagtggtacaccgatttggcctaccggatgcaccacgtaacgtgccaccgatatcgtcgggccgaacaccctctgaagacactacaaggaaactattccgacagtccaagccgttcggaatcgttgaaaggaaactgttttcggcaaaagaaaagggctttcgaatttcttcgaaagccctgctagcggaggatacgagattccggcggcgacctgctgttttcggcttgatttcaacgtttctgggctgccgcttaagtgcttcgccgcttaattcgccgcctctccggcgtgtcgtgacgggttgaaacggacggttatgaacaggtgttttttgggttgcgtgaaacaggggagactattgaggatgctttttccatgaagagcgtgtagttcaaccagtatatagaacggcctccctttgccagcagtagtgatgtgctaaagattacgattccgaaagaggtaatgcgatttgtctcccataggcaaagtgaaaataaaggtaaaatagccgtcgttaaagtccagatgataatacttagccagtttcttgctaattcttcggggaatctctttcgtgcttctaccataaaatgtgaatttgactggtatagcatcgtacatataaatgttgctgtagccatgactaatccggagagggtcgatagcccgatgaataaatcattgggactgccatctccaggtagttgaggtactggattgctgagaagccaccaagtagcggttattatggttgcgcctaggatgtcagtggcgggatgcgccataattccatttattaatgttaaatgtggcattaattactctttgaaatatcgtataaataagtctctttatcgactgaaacagcaattaaatgattgattaggccagtgaataatcgtggttcgtcattggatattgtaatctcgctttgttctactacaggatgggatactaaatttaattccaacagtttgtctgcgaaatcaggtccacttacttgaacttttttgttctgatctactgcagatatgatgaaatcttgcattatgtctttaaaaacgcgacgagcttttccatatgctgtatcgtctgtcaggctaatcctaatgtcgatatcaagatcggctcccactttttgtgcaatttattgataaaattctcctgcgttaccttttatttcataagctttatcaataaaattttttgttgtgaatgatgctgtgagggaatctattccgcgaagttcttttttgaaacgctcgatgctatctgctgtgatgacgggaataacatcccattcataatcttcttcaggccagtaatagtttagtgcttttttgagggggtctacgcttttaccagcattgccacttactctgctgacaagagaatattttgggaagaaggcgaatgctgacgattttgctaaattgtttgtgttgctatatgcctcgctgtccatgaaatcagtgactctcttgtgttcctgatcaatgagctgcataaaatttggctggaattgttcaaaaactgtaagtactggataatgcttgtctgttacagaatcaaaaataatattatcgagtattttattttcccaagggaattcacgaaattcactgagacgcttcatccaattgatatgtcccgtggttccattgctgataccatcacgagacctcagccggagccagtagaactgcactgttctttgaatcacgcttgtcaagttgttcacctgcttagtaagtcatatctacctaatgccaatcattgtacttcatttttctggtgcgacgattgggatgaaggattctacggcccttcctaaagaaagtgtttgtggcagccgccgtagttgtattgagcgcatgctttatgtgtggaaaataacggggagaaatctgcccaatactccggggtagcgtggagcaggccggggaggagtatcctccctggtgttgttaagcggcgtcggcgaggaagatgtgcttgtggtggtattcgatgaattcgtgtgaaggttggctgattgtcggtaatgagatttcgcgtccttcgaagttgtagagccatttgtcgttgatgtcagagtgccgaaccttgtcatgattgaccatgatgcgatagtcatcatcgatggagataaggccctgatcgaaggcacggtcgtggaaggcgttgagcagcagcccgttggatgcggcggttttctcaacggctgacgatgccttccacggtttgatgtggctggcgatcagcagcttaggaatctgcataccggttatacagcaggtgctgtggtagttctgcaatagtgagttgcggaaataggattggttgactcgctgaagtgttgttattggtcgttcctctccggtgggcgtgtgttcggcaacgagtagggtcgttgcggtttcgagaggggaataacggtcggaggccagcggtgctgggttgaagttgttcgcgtccgcttgcaggagcgcgtgccgaagtagattcaggcattgctccatgaacgtatcggggtcttcggcataccactgccagacttgggagtcgagtttgctgccgtgcttcatgcctacgcgcccacgggccttgcggttggcatcataagctgcgatgttccagatcttcaacaccactgagctgggagtgcggtgcaagaacgatgcgagacgttgcacgtcaagtcctttgtcatcgcattcgcgtggtttaagcacgatgtacaaggcgaacgccatcattgtttcctcgcgtgaccaattacggcgaggtgttgatgtactgacgtctgatgccatgaatccaggatagtgcggaatggttcgtgtctgtgctttgtatgcggtatgtcttgtgagtcttagcttgtactcgctgcttcgtgtctgaaatctagtgggaagcagtggtaagcggactgattttcttgaagctgccgtaaggactatgctttcaatgattttggggtttgctttgcgtgctggtcgtgcgttctacagcgacaagagcgacaagagggaatctagtgagaagtgcgaggttgagggggggtcaagcatgctaggaatcctaatgttttcaagggttattaacccattggaagagttcgatcggctttgaatcttcggcatatagagcgattacagagaatctagtgggaactagagcgaatctagtgagcctacatggaaatcaagtgctagtcggagagacgcgtcgaaatcccaataatttcaacgatttcaggggaatcagacaatgctgtcttacgacagcattgcggctagatggaaatctagagtgcgtacatggaaatccggtagggctgcatggaaatcaattcatgttaaccaatgggcgcgcgaagtatgcgtacagtccttgggtgcattgagaccagtatgaagagaagttggcattgatatgaactgatttttgttccgcatttcctctgactcgatgggagatgatggaaccatggcaaagggcactcgatatacgccggagttcaaggcgaaggcggtcaggctgctggcggaatcgcgttcctcgtattcgtcggagacgaacgcgatcgccgcggtggcgaaggatctggggatagcgccggaatcgctgcggcgttggcgcaaccagtcggacgcgatggtcgcggaggagacgaggcagccggccgaggacgcgatggcggagctgaagcggctgcgggcggagaacacggaattgcgccgggcgaaagagatatcgacgacggctccggctttcttcgcggccgggctcgacccgacacggcgttgatggccgcgtgcatcgacgaatacgggaaccgtttcaaggccgggccgatctgcagggtcctttccgaatcgttggactgcgggtttctcacgccgcgcggctgccgcatgttcagaacacgtcccgtcagccgcatgcgggcggggcatgaggcgctggcccgcgccgtcctccagatccgctcggatttcttcatggccgtgtacggctgcgggaagatgcacgcgcagctggtcgcccagggctgggatccggccgaggtcggccgcgaccaggtggtgaacatcatgcgcgggctcggcatccggggcgtgcgccgcggcagaaccccggtgacgaccaggcccgccaagggcgcgggcggacggccggacctggtggaacgcaagttcgaggccagtgcgccgaaccggctgcacgtggccgacatcacctacgtgcgcatggcgaacggctcgttcggctgcacggcgttcgccgccggcgtgttcgcccgtcgcatcgtgggctgggcgtgcgccaccaccatgggcaccgaggagctgccgctgcaggcgttggaacaggccatcgcctgggccgcgacgcatgacggcaccgacgggctcgtgcatcacagcgaccatggcgcgcagtacaccggcaccgcctacaccggccgggtcaaggaatacggcatgctgccgtcgaccggcacggtcggcgacccgtacgacaacgccatggccgaaagcgccgacggcgcgtacaggaccggtctcgtctggcggcgcaagcccttccatgatccgaaggacctggggccggcgacgttccggcgggtctcgtggcggaactcgaaacggctgcaccggcccctgggctacgggacaccggaagcggtggaaaccgagtattatacgaatcaagcgtcgcaagccgcctcactataagggcggaacgttgataatggttatgccggtttagctgaccggcgataatgaaggatgatggacggtgcggtgaccccgggcggaactgacgattccttggaacctgtcctgtttttgatttgtcccgcgccgcccaccgacccgatggccatggaacatgacctcataggagcgtggttgctccatcggttcccagcaagaccatggtagcgtgccccgtcaacgttctgtctgtgccggaagccatcggcaacggcatcgcgacaaacgcatgaaaggaccgacgatgaagtcgactataccaacgatcctcgccggagtggatacgcattcaacaacccacacactggccctgctcgacgaacacgggcgggtgaccgacaccgagaccttcaatgcggacccgaagggctacgaacggctgatcgccatgataggtgacccggccctgtgcctgggcgtgggcgtcgagggcaccaactcgtacggtgccgcgctctcgcgcaggctcgccgcagccggctacaccgtgcacgaggtgctgcggccgaaacgcagcgtgcgccgcagcgacggcaagtccgatcccatcgacgccatagccgccgccagaagcgtgctcgccggcgatgggatcagcacgcccaaggcatccgacggttggtgcgaggcgttgcgccacctgatcgctgcacgcgagcagctcgtcacctccatgacggccatatcgaactgtcttgccgggttgctcaccaccgctccggaaggaatcagggagaggtaccggtcgctgccgtccaagagacggatcggcaagctcgcggcctgccgtccctccggtggcatcgtcgagcggaacgtgctctcatcgctgaagacgctggcgtcgtcatggcgcgaactgcacgacagggccgatgtgctggagtgccgcatgcgccagattctggaagagaacgcgcgtcccctgctcgacgtgtactgcatgggcaccatgtcggcggcccaactggccgtcatcggcggcgacaacccggaacgaatccgctccgaggcggcgttcgccaagctctgcggcgcctgcccgctgcctgcatccagcggcaagaccaaccggcaccggttgaacagatccggtaaccgtcagggcaaccgggccctgtataacgtcgccctggtgcgcatgagccaccaccaacccaccaaggactacgtggtaaggaaaaccaaggagggaaagggcaaactcgagatcatgcggtgtctcaagcgctacatcgcccgcgaggcctaccgggcgctcatcgcgatccgcaacggcgaagccggacgcgaacccgccgtcgaacgcggggccaggctgagggaagtgcgcgtctcgctcggcaaaacccagcaacaggtcggcgacgcgttgggcgtgccgtccagccgcgtcagcgagatcgaacgtggggttcgggatctgcccgaactcgaacgacaaatcatcgagtggatggactcaatcctcgggcaaagccaacactccaacacatttgacaatgtataggagcatcaaaaatcaggccacttcacattgacctggttacgggatgctgggcggattaaaacaaatcagccgttgtattcgatgtgtaggctggggtcgctttcatgttcgtcaatgatttggttgtaagccttgaccagacgcgaaagggtttcgtgacgtgctgcgttggtgaagtggccatgctcgtgcacattgctggaaagaaacgattgcaagtcccagacttcaaggcggttttcgaagcccatgtcggaggctaagtcccatgcggttttgacgcggtcgcgcacagtgatgatgattggatgcagtccagccttgatgttgcgctggcatttatccatgagcagggatgctggggcagtggtgcagtgtatggctgtgtcgccgacgttgaaatcgcctccgcgcccggtcgggtcgtcagcaacggacgcaccgttgatttccacttctggggcaacgatggtgagcttcgctgcgacaagatgttgcagaacggtaccgacgtacatagtgcccggattttccttttgtcgctgcgctgcctgttgcagcagatgttctacagccgcatcgacggaaagagagttgtcggattccagtttgaatggtttgctggtgaagaatgcctgaattcgtttgacccagtattgctcgatctcgttgaattgctccgctgttgggcgtaattcgttaatgagctcggcgtagtcgtgcatcaatgccatggtgccacggctggttcgtccgccctctgctgcgaggagtcgtgtgatgccatattcggcaaggattttctggcagttatctttgctgattcccttgacttgaccttccttgttcgtgtgatagtcgctggcgtcaatgggaagcgtgtctgcggaaaagaagcgattgagctggatgacagcagccaaagcgcccttggtgtttacctgatgggacttccggaaatcattgatgggagtcagatccattgtttgcctcgcttatgcagtgtgatttgagagcagagtttgctccacgtataggtctttgcctagggtgccgttcagtgcaggcatgaagtagtgcttgccaagccattccacgacggggacggagacggcgtcgccgaatccgaacatcacttgattggggcgtagacccgtaatgttgtagtgggctgcgcccataagagcagcgtattcgcgtggtgtcatccaacggacagcggttttgccattgcccatgcgaatgatcgcttggcgagaggagccgcctcgtgcggtgcgtaggcagccggagatgtcgtctgcgcggacttcccacacggctttgccgttgcgggtgcggcgataagcagtccggtaggaatcggttgccccattgcgcaacgtttctacacgagttgcctgaaccggcgacagcgaatcaaggaatttggcagttctctcagcgttccaccagcgttcgtcgtcgttagccatgctctcgacgtacatattgaggccagacatcaggggggacggcggttcgggcagtggtgcgcgatgcgtgcggagagaggtgtccgcaaagacctgctgcagccagtcagggcgcagggaagaatcaaactgttcggcggccggcggattctgcaggcccactaaaaagagtcgcggtcgggactgagggataaatcgacgagtgtcgatggacaatacgtctacggagtagcccagttcattgaaggcatgcactgctgcggcaaggtcttccccagagtgagaagtggccaatccgttcacattctcgagaacggcaatcggcggccgggtgttcccaagttcttcgagcagtcgcacgtattgccagaaagcgccggattgcttgccgttcaggcccgtacgagtgcctgcaagggagaggtccgtgcaaggggaggatccccaagcgatggaggcatcgtggggcagatcgtcgccggagagctcactcatatccccctcgacaagggtgtggcccggcgtatccgtgaagttattgcgatacatttcgcacttggcggcgtcgatgtcgttcgaccattcgacctggaagccggcttcttcgagtccaaggcgtgctaggcctattcctgcaaagaattcgagggcttgcgggcgtgctgtgttggtagccgcgtgcgtgcgattatcgtccatgtccccaccttacctcgtcttgtatgcgtattagtccatgatagttctaggtgtagaatatttgttcgacttgcagccgtgtcctggagcctattgaagatcacctagatttgggaactggatattgtttgttttacttgctaggcctgcgaaatcggggtagatgaaggactcgcggtatccaaacgcgccttctaggtaacttcgtatctctttcttagctttcttggcaatgacgaatgaatacgttggtgctagattgcgttgattcggacgtgcgttgtgatttggcgagaagggctttgcataaattgaggaagctgcgagtatatctggcctcttccaatattctttgcccgtaggcttgcgaaaatattgaaggattcgactatttgtaattggaattccatcgaggataaatactgcattttgagcagcgatacgtgattcgtattctggtggacgccatacgatacggcgtgatccggttccccagttggctgctgcgcgttgctcgtaatcgtgcaggttgaaccagaaagggtcgcgacttagcagttcttcggagtagtctggttgctcattattgcctgatgcgtatccagctaaagcgaataggcgcgcgtcatgatcttcgtgctcgtgcgttgggtcatagacggcgaaccaagcagctatatatgggttgcaggatgcgtcgagtaggcgtgtggggccgccaaagtgctgaatgcgtgcgaatatctctaaagcagacatgtttccatatcgccagtcttgacgagcaagattaagaatctgcttctcagcttgaatcatctggtcttcggtcggatagggctgtttggttttgggcttctgttgaggggaaacaactccattttgcgtcattagtaggcgaaataatttgctatgtagtccccaagaggcattattttgtcctcgccagtataacggtatatttgatacatgcttttgcagtagaaggattgcattatttaaatcttctatactctcgatgcgtccacttttggagtcaaaaaaatctgaaggactggtcatctcaggagagtagtaatgaggtgactcgttagagctatggaaataactaggggttatggatcgataatatttttgcagatttgattgtgtctcttcatattgttttagtacttgcgaaatcccggaatatacgttcagatatttttcgtcgtaatgagcaaaatcaatttttgctagtgcgtcacgaaggctgtcctgaataggttttatggaagacaggattgtgcttgaagataagttagagattgttttgagggctttctcttgctgctctaggaaagtttgaattgctgaagtgcttgtttcgaggggagtggatataagtcgcaggttgttgctgatttctggggttttttgaatggtatctagcagctgatgcgtcatgttggggcttattgccattagattcggcgttgcttgcgttattttcgctatagacggcaacgcgcttacatgttcatggtgttcttcatccttaagcatggcttgatagtatatcgagttgttgccattggattgtgctgatcggttcttcattcttaaaaagaaaggccgctattgtttttaatagcggccagatgtttgagtcgtcttctgcgatggatacactgggcatctttcatctcagaaagttggctatctgtaattgcggtgccgcatctcctgtttggctttgctggtccagagacctcctttgtcgatgagttcattcaattgcgtggcattgagctgatggtagcgccggtttgttgcgtagggaggtaggtgcgtcttccagctgtcaatgtctgtgacggaatcgtcggctttacctgttgcaagatgataggtggtgttctcgctggtgccatcttgccgtcttgccagttcagatgtcggttcgcctgccgtaagtccttgcagatcttgcgttttctccggtaatgcccacggatcggcgtcgtcggacaaggtgggaaacaccgtcttgtctggttcgtacggaacgttgcaatagcttggttttgacgaaggcggcaagatggcagcagctcttgtgacagcgaccggatccggcacagttgcttctgaagcctcagtttgttcaccgctgagggtgtccgtggcttccgcactcaaatcttcagagctttcctgattcggatgatccgcataatccggagacagtcaccaccacatgttgccgtacttcttgcttgccagcagtggctttgggcgtcgtctgccgtccagaacttactgcttgctgaactcgcctttcgcttcgttgattactctgtacgacggcacaccccaatacaagccatccggtgtgagctccttgttgtggtcgaagtagtcttggatgaacgtacgcacgtcactatcctcacgttcgctggggccgtaagcactctggttgtgcgattccgccgtatcgtccgtttcgcccagcaagtggacatgtgcgcagccaagcagcggattatcctccaaccggtaggccatggctcgtggcattggccccagattgaacttgaccggtgcgaacagtcgccgttcctcattctccggatccttcgccaccagaaaagcggctcgtgctgcgccgatgatgccgatgctgccgcctccacggtagatcgccgctccctgccctttgttgagatggcgtagcgcgataactgtgcagccggtttcctcacacagccgcttgagcggagccatcacctgtgcgcgaatatcctgatccttgtagctgttggtgtcgctgcccaaaaacgatatcagcacatccacgacaatcaggccgatatgctgctcacgcacagcctgtgctatctgtgacagtgcgtcggtgagcgtaatcgctacctccttgccatccttgaagacctccgatagggcgaacatcttggatgcgtcgccttgtgcggcgcgaatgcgtgggctcacggtgtccgccagtccgtcttccgcagtcaacagcagcacgttcgcaggctcgcatccagcggacccatccggccatgctgctcccgtggtgacgtgagctgcaatatccaaggccaaagtgcttttgccagtcgccggatcgccgtcaatcagtacgatcttccccttgggaatgtggcccggccacaaccacaacggtcgctccggttccacatcagctaaacgggtcagcgaataggcgcggggcgtcagttcagtcttaagctcagactcaggctggctgctttcgcttggcaaaatctcaaactccaagccgctcatcgccgcgtcggaagcgtcgtgagcctcaccagccgcctggataaacgtcaacgaccgcacgaacggtgtcagcgtctgcgccacttgctccttccagcgagtgccggtgtcgtccttatccataatggcaaccacatcagctccactaagggctaagcacgctgaatcaagatccagtttcgcggcgaagttgccgccgcctcccgatgcggttacagcggcatagccgagcgctcgcaatgtgccggcatctttttctccctctatcagatacactggcttgcccgatgccacggcacgtttcgcgtcggcggccatccacaacgggtgcttgccggcggtgttgccgctttgcgagattcgcttggtgggagagcgacgaacaatcagaccgtccacatattcatatgctgtgccgcgctcgctgtcgtagatcattgcttcatagccattggaacgagccagcgtagcgggagcgttcagcgcgttgagcacatcgtcggcttggcaagtgctgcagcggagcaatgtggcgctttccagcggggaatacagcacagtgagcgagtcagctgcgccgcagtttgggcaagtgccgtgcagcaggccggtgtttggctgaactgcaatagctgcgcagatggcggcgaacataggggatcggcctagggccaatggttccaagtatggttcgggcatctcgtactgctgtctgatttccgcagagttttccgtgtatgcaggtgtaatcgtcgttgtctcatttctgctgagaagcggagcgttcgtgacattcgcatgccgtatggccgccaaatcggcggcggtgagccggctatcgcagctgtaactgttgtagccgctgtaatcggcatggccttgaggtccgctttgttgatcgaacgggtcgatgattttcaatccaagtgcaccggcaatggaagcggcatcgcagtgttccgctccgaagcagtgcagcatggttttgccgtcggactggtcgtaggtgatgtgcagtgaagtgccgccgtctccgtcatgggcggggcagctgcactgagcgtgttgtcttccggaggtgtcgcgcggaagctcttggagcctgagatctcgagaatagcgtttcgcggcttcgagcactcgctcgtatgaggttgccatgctcactcctcacctgcggattcgcgcacgctggtgagattcaccagaaacgtgttgcctaccttgcgagcgcgtatctttccggttctgatcaatccgtaaacgcttttcacgtccttgtagcccagcatctccgccacttgcgctggcttggcggtgaggcgcgggtagtcattcttcgttggaattgcagccatatgtttccttgctctcgtgcggaacagagcctgaggagcgaagtgcttccgtcgaattcggacgcacttcgccctagatggttctgttgtggttgttggctgcaccggtgcatgttccccaggtttttgccggcccctgggaagctggaattcagaatatgacgttattccaaggagcgcaaaggttgaaaacggctgaagcttgaactagatgtgtggtcgtgaaatcgttggaatttcaacgaaaacaagtgattctgcggtgaaataaggcgttcagaataagacgaataggctttgttggttgcaatgagattggcttatggcatgttgtctttgatgagcccgtttgtcttggttgagtccagtggccttggagtttgttggcttctggcagaaattggttgaatttgttaagtggatttctccgtatccgcgcttgtgatctcaagcattccttcatactcgtcgaggttggttacgcgggtgtccctcagcagttcccgcagggtcggaatacccgtctgcggggttcgctgctccgcgtttttgatggcccgcagcttgcggaagaatgattcgacgatgctgatgtattccttggccgtctgtatgcgtgacaccgatttgccgccagcccacgccgccgccgtcaattcgtcccggatgccgcgcgcctccttcttggtgggcagcccgatgatgcgcgacctgtccgcggcttcttccgggtcggatagggagtcgtatatcttggcgagtgtcttcctgcctttgcggcggatggggtccgggctcatgtcttctccttggcggtcatggcggtgccggtgccgttcgctggcgaatacccggggggggagggatgccggcggggtttgccggtttctccttcgggcccatccgaccgacggacgttcctcggcttcttgtctatgtatcaaggagtcgattgacggttcgaatgggctgttatggcacccgtatgcgttcgtgtggcgtttgtcggagggggtcaggggggaccttcgcgctgggccgaccggtattcgctgcgatgcgcttgcgatacggaggctgggattgttgcgaaccaaaacgaaaaaactgcgcggagaacatgaagggactcgaatcggcccactgacgggacacatgggacgcggtcggacttcgatgacgaacacacggcaggcgaaggctcgaaggcgttttcggaatcgtcggttccgatatgtgacacgcgcggcaggtcggagccagaggtgtcgaaacagagggaacctggagggaaccgacaatcggaaggaaccaaagcaaaaccccggaaaccgaatgatttcaacggtttccggggttccaatccgggcggaggatacgagattcgaactcgtgaggctgttacaccaacacgctttccaagcgtgcgccatagaccactaggcgaatcctccattgcgctgtttgctgcggtcttttagcctcaacagacaactcgaagagaataccacagactcgcggacaagcaaaaccgtcgcgtgttgtgcgtgtgtcgcgcttggcggctcgcgcgtccgggatccctccggcgctccgatgcccgaattcagtagttgttcgagccggcaccctcgaagcgcacgttgaagccgcgctcgtagtgcaggaacatgtcggcgccgtagcggtccgcgtcgcggtgggtgaacagcatgcggatggcgaatgcggtctgcacgtcgtgcggcagggcgcggaacgccttgtgggcgttccatcccgtctcggtgatcgcctggtcgggcacacctaccagcttgtcggcgtgcagtccggcaagaacctgtccgccacggcttccggcgattccacactgtccatcgccgacacgcccgagaccctgaccgacgccaagaagcaggcctggaagttcacccagatcgaccagtccgacaccgagcgccccgacctcaaggcctacgtcatcaccaatacggactgcaaggtgctcgtcgccaaggacggcaccaacgtcttcagcgatgagtcggtggaagacgccaagtccgaccccgcggcccggtggattttcaacacgtccgacggtgccacctaccagctgctcaacgcatccgcgaagcagaacatcaacgtcgacgcgttcgacccgaaggccggtgcggccgcttccgatgaggaggacggcgatctgaccgacaagatcctggtcgaaggttcggcgaacaccgagaaggacggcgaatacacgctgatgtattcggtgaccgactccgaaagtgcgtcatacacggtcaagcgtgtcgtgaccgtcaaggagaagtcagagccgaccgaaccgacgaagccgaccgaaccgagcaagccgaccgaaccgacgaaacccggcgacacggtgaagccgaacaagccggatgccggcaacaagcagcccggcctgtcgaagaccggcgcctctgtgagcggcgtgttcggcgcgttcgcggcactgctcgcagtcggtcggtcacctattcggtggccggccgactttttgttgactgccggggcctcacgcgggaggtgaagtccacccatcccgccaaagtctgagtgtcttcggatgggactttcgccggaacaagtcgaacggaaccggggccgggactcatgggctggcgcattgccagtcggccctgtgttcgtgtcgcgtgggatgatggtggcatggtgacatcgaacgttgtggagtttgcggggaaagcgcgcatgccgcgcctcggcatgggaacgatggcgctctctatcgagggacgcccggaccgggcgacggccatcggcacgatccatgccgcgcttgacgccggagtgcgttatctcgacaccgcatggtcgtattatctgccaagcgaaccggggcctgacggtacaggcgtgccgcgtgatttcgggtacggcgagatgctggttcatgcggcgctcgccagctggagcggtccgcgcgatgaggttctggtcgccacgaagactggttatcgccgaacgctggaagtgacgaaccgcgacgcggaagatcctcagcaatccccgggcgacggcgcgagcgcatccgcatccgagcgacagcacctgcaggcggccggcagccggtacgggtggatggccgactcgcgcccggagacgatgattcgtgacgcgaaggagtccgctctccgcctcggcgtcgacgcgctcgatctgttgtattcgcatggccctgaccccgcggttccgtatgaggatacggtcggcgcgctgaaaaccttgctggatgagggcgtgattcggttcgccggcatctcgcgcgtggacaatgcgcagattgacaccgcccgtgggattctcggcgaccgtctgattgcggtgcagaaccagttctcgccatcgcatcccgaccccgagcatacgatgggtcactgcgccgatctcggtcttgattttgtgtgctggtcgccgctcggcgggttcctggacgcattcgacagtcatgcgtatgatccgttccgcacggtcgcagcggcccgcggcgtctcgtaccagcgtgtggtgctcgcgtgggagctggccagatatgaccgtctgttcgccattcccagtgcccgcaacccgcatgaggtccgggactcgttcgccgcagtcaatctcacgctcgtccctgaggagctgtctttgctgccgtgaatcaacgctatgagtcaccgtcataaatacggaacaggctcgtcgccaaacgagcctgagatacatgctggtggttccgggaatcggttgaaaaccgaaatgcgcatagaacgcgtgtgctttatcgtcgtaaggttccacaatgagcgcacgtgaccctagtgcgccgctgacggatcgtgctcgcagtgccgaatatgcactcagcgtgtagaatcccgccggttcacctgacgcagtgaatgacacgtacgcgacggccgtcccatgctgggccgatgacggtgcgcgttgcgcggcccacttgtcgatgaacggtactccacaagagaacttccccattctctcttccgggccgagcttgcgcggacgttggaaatgatggatcatgcccactgcggatccctctccgtgagtttttctgctgctggcggaaccggctgatccaatgcctgtatgaaatcttcgaatgcctgtgattccagatgcaggatggttgcttcttctatatccttacgggctgattccaggagatggcgagcggttcattgcgtgagcgtgctgccggtcagctcggcggcacgctcgatgagctgccgttgcgcatccgtcagtcgaatgtcaaaccgggacgttttctgtttcgataccgtttgtttcgttagtgtcgccatcgaattgttgtacggaaaaaagcgtacagatcaagtttagtagcgggggagtaaagcgcggacatataatcacatactgtaaattgtttatggtgtgagataatattacagatgtttgcacgatgtatatgccgctggaatgtattggcggtactccgcggagcgcggtagtgcggcaatggtcgaatcggaaggcggtgcgaaatgggttttgagcgggaggcgctcagcgaactgtacgccagcgtgtggggcaaccgttccaagatgcagaaggagttcgcgcgcggcgcgcatggcgagccattcattctgcacgagctcgcactgcgcggcaccatgacgccgtcgcagctcgccagttcgctgaaggccagctccggccgcatctccacagtgcttgccgctctggagaaaaaagggttgatcacccgagacatcgacccggacgaccgtcgcatcatccgcgtgaaccttacggatgccgggcgagagcggtccaagtgcgacttggaggagatgcgttcggcaatctgttggatcttctcgcagatgggggagcggcgcacgcgcgagttcgttgatctgctgtcggagttctcgacatacatggccatctgccatcccggcgctccgcgcccgacccccgatgaggtgcgggccgcgttcgccgagcgtgacaggcgtgtcgccgatcatatgcgggccgagcgcgcgaaggccggcgaggagtagcttcttccgccggctgcggatgacgtgggggacggcgtgcgtgccgtgtctctcgtgcgcagccagcgcaaagcgcgccattcacagcgaatacacagaataatgcgtaatatcttacactgtaagtaatctaacaacagaaactaattcgggcatcggatatcgatgccgcggcaaataacgtaaccaatcaccaacaaaacacaaggggaaagccaatgcttcgcatcctgaaatacctctccaaagcggagatcggtcagatgctcatcgccctggtgaccatcgtcgggcaggtcttcttcgacctcaaactgcccgattacatgtcagacatcaccacgctcgtcgagacgccgggcagcgcgatgagcgacatctggatcgccggcggcaagatgctgctcatctccctcggctccgtcgcctgtgccatcgtcaccggctacatctccgcacgcgtcggctcgtcattcacccagcgcctgcgctcgctcgaattccgcaaggtcgaatcctatggccccgccgaaatgagcaaattctccaccgcgagcctcatcacccgctccaccaacgacatcacgcagatccagatgttcatcaccatcggcctgcagctcatcgtcaagtcgccgatcatggccgtatgggccatatgcaagatcgccggcgaaggtttcgaatggactctcgccaccggcatcgccgtcgtcatcctgctcgtcgccgtcgtcatcatgatggccatggtcatgcccaagttcaaggccatgcagaagctcaccgacaacatcaacctcgtggcccgcgaaaacctcaccggcctgcgcgtcgtgcgcgcctacaacgccgaggactaccaggaggccaagttcaccaaggccaacaaggacctcaccgacacgcagctgttcaccaaccgcgtcatggcgttcatgatgccgctgatgaacaccgtcctgaacggcctgatgctcgccgtctactggatcggcgcctatctgatcgacgccgccggcctgacggacaagctcaacgtgttctccaacatggtcgtcttctccaactactccgtgcaggtcatcatgagcttcctgctgatgagcatggtattcgtgctctggccgcgcgccgacgtgtccgcgcagcgcgtgctcgaagtgctcgacaccgatccgatcgtcaaaaccggcaccaagaccgccgccgacgtggcgcgtctgggcggcgggaaaaccggcaccgtcgagttccgcaatgtgagcttcacctaccccggctcacgcgaggcgacgctcgaaggcatcgacttcaccgccgaaaagggccagaccgtcgcgttcatcggctccaccggctccggcaagtccagcctcatcaacctcgtgccgcgcttctacgacgtgtcggccgggcaggtgctcgtcgacggtgtggacgtgcgcgaatacgatctgaaagcccttcgtgacaagatcggatacgtgccgcagcagtccgtgctgttcaagggcacggtcgcatccaacgtgagctacggcgacgacgtgaacggggcaagctccgcggacgtcgaaatggccgacacctccactccggccggccgcaaacgcgaagccgaactcatcgccgcgggcaagagagcggaaggcgccgcaatgccggctgaacagatgaaccgggtcaaggcggcggccggcgtcgctcaggccaccgagttcgtcgagcgcatggacggcacatacaccgccccgatcgcacaaggcgggtccaacgtctccggcggccagaagcagcgcctgtcaatcgcgcgcgccgtctaccgccaccccgaaatcctgatcttcgacgactcgttctccgcgctcgacttcaagaccgaccgcgaagttcgcgacgcactcgccaaagaagccaagggatccaccaagctcatcgtcgcccagcgcatcggcacgatcatgaacgccgaccgcatcatcgtgctcgatgacggcaaggtcgtcggccaaggcacccatcaggaactgctcgacacctgcgatgtctaccgtcagatcgccgaatcccagctcagtcagtcggaactgaccgcgtgagatcaatacggacttttaaggagtaacaaatgccaggaccaagaggaccaatgggcggcggccgcacggtcgaaaagcctgccaatttcggcaacgtgatgggcaagctcgtccactactgccgcaactacctgcccgtcatcatcattgcgctcgtgctgggcgcggtcggcacgatatgccagatcatcggaccggacaaactcaaggacatgaccaacgagatcgtcaagggactgccggccgtcgtgaacggcaagccggtgatgaactcggtcgatttcaacgccgtcggccgcatcgcctggctgctcgtcgcactgtacgtcggctacgcggtgctcagctacgtgcaaagctggatgatggcgaacgtcacccagcgcaccgcccagcgcctgcgcgaatcgatctcggtcaaaatcaacaagctgccgctcaagtacttcgacaaggtcagctacggtgatgtactctcccgcatcaccaacgacgtcgacgccatcggccagacgctcggccagtccctcggctcgctcatcacctcggcgacgctgttcgttggcgcgctcgtcatgatgttctacaacaacgtcatcatgaccctgtgcgcgatcggcgcgagcatactgggactcatcatcatgatggtcatcatgaaatcctcgcagaaatacttcgcccgccagcagatggcgctcggcgacgtcaacggccacatcgaggagatgtacgccggtcacctcatcgtcaaggcgtacaacggcgaggccgactcaatccgccgcttcgagaagtacaacgccgacctgtacgaatccggctggaaatcgcagttcctgtcaggcctgatgatgccgctgatgaacttcgtcggcaactttggctacgtgatcgtgtgcgtggtcggtgcggcgctcgccatggacggacagatcgaattcggcgtgatcgtcgcgttcatgatgtacatccgcctgttcacccagccgttgagccagttcgcgcaggcgttccagaacctgcagcgatgcgcggccgccgccgagcgcgtgttcggcttcctcgaagagccggagatggatgcggaaccgaccaaggccgaactcggcgtggctgatgccgccgcgagcacggcacggacggacagcggcaagctggcgcatcgcggcactcgcgcgaatgccaccgccggtatgacggcttcgcagcgttcgcagctgctcggctacgatgcggccggcaacccccggaccgtgcgcggcgacgtcgaattcagtcacgtgcgattcggctatgagcccggcaagccgatcatccacgacttctcggcaagcgtctccgccggccagaaagtcgccatcgtcggtccgaccggcgccggcaaaaccaccatggtcaacctgctgatgcgcttctacgagatctccggcggctccatctccatcgacggcatcgacaccacttccgtgccgcgctggaacgtacacgaccagttctccatggtcctgcaggatacatgggtgttccgtggcaccgtgcgcgaaaacatcgcctactccaagcccggcgtcaccgacgagcagatcgtctccgcatgcaaggccgtcggactcgaccacttcgtgcgctctctgccgcagggctacgacaccgtgctcgacgacaacacctcgctctcccaaggacagcgccagctgctcaccatcgcccgcgccatggtgcaggacgctccgatcctcatccttgacgaagccacctcctccgtcgacacccgcaccgaagaactcatccaaaaggccatggatgcgttgaccgtggggcgcacgagcttcgtcatcgcgcaccgcctctccaccatccgcgacgccgacatgattctcgtcatgaaccacggcgacgtgatcgagcgcggtacccacgaggaactgctcgcggcgggagggttttacgccgacctctacaacagccaattcacactcaccgattgatggagtgcccgttgcgctcgctggattgatgaggctgacagcccggtgaacttacgcatggcagtgcgccgtgcgtgggctcgccgggctgtttgctatgtaggcgagtgatgggcggagaatttcctatatatggtgcgcgacgggttcggggactgtggtttgcgtccctatgtgcgcacggtcgtcgttccggcgcgcacatagcgacgcaaacgggagaaggattgttgagagcggatgcgctggtgcggcagatggccggtgtgcttccatagaacatgattgtgacgagagcagaggggcgtccggcgcgtatcgccctctcggtctgccacacaatgcgtttttcgatggtttttgggctggtgtggtacgcgggcatcggaggagtcgtttcgggccgttgaaaaatggcggttttgcggtgcatgttgtgccacaccacgtgatgtgagggttcacatttcattgtgaggcagactggctggccacacaatgcgattttgatgtgattttgcgctggtgtggtacgcgaccggctgcgctgacgacttggccggccgatggcgcggatggtgtgctcccgctgtcaggagctgccgagcgtagcgatgctggagatcgttcttcccggcggccctgcaccctgtgataataatgccaagaatgttacgtaattctgggaacggcggtatccaggggctctctgagagctgtgattccaattgaagacacaagtcgccgacggacttgattctttatagtaaacaatgtatatataaacataaaccggcaaagctgctggctgccctataggagaaagaaccaaatatgaaacatagatcgatgtcatcgcgtctgatgccactggtggcgtcctgcgcgacggtcggcatgctgctggccggactacctgcgtcggccgtcgcggtcggcacgacgagagcggcagcgtccgacgcctcgtcctccaccacagcaaccatcaccccctccgccgataccacgttgcagacatggacgagcgagaagaattcctcaatggcgtccaagccgtacatcggcacactgcaagggccctcgcaaggcgtgttcggcgagaagttcgagtccacggatgccgcggacaccgccgatctgaagaccggcctgctgacgttcgacctgagcgcctacgaccatgcccccgattccgcaacgttcgagatgacgtacctcggctaccgcggcaacccgacggccaccgacaccgacaccatcaaggtgacccccgtcgacaccaccgtgtgcaccaataacgccacagactgcggcgcgaatgtcgcgaccggcgcgaccaagccgaagttcagcatcaacgactcctcattcgtcgccgagtccaagccgttcgagtacggtacgacggtttacacgggcgacgccatcaccgtggttcccgccaataccaagaaggtcaccgtagatgtgaccgaaatcgtgcgccagcagttcgccgaaggcaagaaggtcatcaccctggccgtgggcgagaccaagaagaccgaggttcgtttcgccagttccgaaggcacgacgtccctgaacggcgcgaccgcagacatggctccgaagctgaccgtttccgtgtccaccaaggacgatctcaagccctccgccgacaccacgttgcaggcatgggccagcgagaagaacgagaagaagaacactgcggcctatgtcggcgcgctgcagccggaaggcgattacggcgacttcggtgagaagttcaagtccaccgacgtccacgatgtcacagacgccaagatgggtctgatgacgttcgacctgtccgattacaccgcggcgcccgagcactccatcctcaccttgacgtatctgggctacgccggtgcagacaagaccgccacggccaccgataaggtcaaggtggtcgctgttgacacgtcgcggtgcaccggcaccgctccctgcgacaccaacaatgccacgtgggcgaaccgcccggacttcgaggtgaccgataccacgaagaccgcgacgtcccatgcgttcgcttatggatctaagaagtattccgatggcatgaccgtcgaatcgggcaacgccaagaaggtcctgctcgacgtgtccgatgtcatcaaggcagagttcgccaagttcagcgccggcgccaccgagaagaagatcacgctggccctgggcgagctcaacaagtccgacatgcgtttcggcagcaaggaagtcacctcgctgaccggcgccaccgaagccatgcagccgaccttgtccgtcaccaagaagccgaaggcatacacgctgagcatcgaaggcccgaccaaggtcaagtaccagaagggcgaggcgttcgacaaggccggactcgtggtcaaggccaccagcacggctgacggcacggtcaagacgctgaccgaaggcaacggtgaggataactacaccatcgacaccagcgctttcgatagtgccagcatcggcgtataccctgttaccgtgaagtacaacaaggaccccgaaatcgccgcttcgttcaacgcctatgtcatcgccagtgtcgaggacggcggagacggcgacaccagcaaagacgactggctgtggtacaagcagcccgcgtcgcagaccgacgccaccgccaccgccggcggcaattacggcaaccccgacaacaaccgttggcagcagaccaccttgccgttcggcaacggcaagatcggcggcaccgtctggggcgaggtcagccgtgaacgcgtcaccttcaacgaggagacgctgtggaccggcggccccggatcctcgaccagctacaacggcggcaacaacgagaccaagggtcagaacggcgccacgctgcgcgcgctcaacaagcagctcgcgaacggcgccgagacggtcaatcccggcaacctgaccggcggcgagaacgcggccgagcagggcaactacctgaactggggcgacatctacctcgactacgggttcaacgatacgaccgtcaccgaataccgccgcgacctgaacctgagcaagggcaaggccgacgtcacgttcaagcatgacggcgtcacctacacgcgcgaatacttcgcgtcgaaccccgacaatgtcatggtcgcccgcctcacggccagcaaagccggcaagctgaacttcaacgtcagcatgccgaccaacacgaactactccaagaccggcgaaaccacgacggtcaagggtgacacgctcaccgtcaagggcgctctcggcaacaacggcctgctgtacaactcgcagatcaaggtcgtcctcgacaacggtgagggcacgctctccgaaggctccgacggcgcttcgctgaaggtctccgacgcgaaggcggtcacgctgtacatcgccgccgcgacggactacaagcagaagtatccgtcctaccgcaccggcgaaaccgccgccgaggtgaacacccgcgtcgccaaggtcgtgcaggacgccgccaacaagggctacaccgccgtcaagaaagcgcacatcgacgatcattccgccatctacgaccgcgtgaagatcgatttgggccagtccggccacagctccgacggcgccgtcgccaccgacgcgctgctcaaggcgtaccagagaggctccgcaaccaccgcgcagaagcgcgagctggagacgctggtgtacaagtacggccgctacttgaccatcggctcctcccgtgagaacagccagctgcccagcaacctgcagggcatctggtcggtcaccgcgggcgacaacgcccacggcaacacgccttggggctccgacttccacatgaacgtgaacctccagatgaactactggccgacctattcggccaacatgggagagctcgccgagccgctcatcgagtatgtggagggtctggtcaagcccggccgtgtgaccgccaaggtctacgcgggcgcggagacgacgaaccccgagaccacgccgatcggcgagggcgagggctacatggcccacaccgagaacaccgcctacggctggaccgcacccggtcaatcgttctcgtggggttggagcccggccgccgtgccgtggatcctgcagaacgtgtacgaggcgtacgagtactccggcgaccctgccctgcttgatcgcgtgtacgcgctgctcaaggaggaatcgcacttctacgtcaactacatgctgcacaaggccggctccagctccggtgaccgcctgaccaccggcgtcgcgtactcgcccgaacagggcccgctgggcaccgacggcaacacgtatgagagctcgctcgtgtggcagatgctcaacgacgccatcgaggcggccaaggccaagggagatccggacggtctggtcggcgataccaccgactgctcggccaacaactgggccaagggcgacaacggcaacttcaccgatgcgaacgccaaccgttcctggagctgcgccaagagcctgctcaagccgatcgaggtcggcgactccggccagatcaaggaatggtacttcgaaggtgcgctcggcaagaagaaggatggatccgccatcagcggctaccaggcggacaaccagcaccgtcacatgtcccacctgctcggactgttccccggtgatttgatcaccatcgacaactccgagtacatggaggcggccaagacctcgctgaggtaccgctgcttcaagggcaacgtgctgcagtccaacaccggctgggccattggacagcgcatcaattcgtgggctcgcaccggcgacggcaacaccacgtaccagctggtcgagctgcagctcaagaacgcgatgtatgcaaacctgttcgattaccatgcgccgttccagatcgacggcaacttcggcaacacctccggtgtcgacgaaatgctgctgcagtccaactccaccttcaccgacaccgccggcaagaagtacgtgaactacacgaacatcctgcccgccctgcccgatgcctgggcgggcggctcggtgagcggcctcgtggcccgcggcaacttcaccgtcggcacgacctggaagaacggcaaggccaccgaagtcaagctgacctccaacaagggcaagcaggcggccgtcaagatcaccgccggcggcgcccagaactacgaggtcaagaacggtgacaccgccgtgaacgccaaggtcgtgaccaacgcggacggcgcctcgctgctcgtgttcgataccactgcaggtaccacgtacacgatcacgaagaaggcgagcgccaacgtgcccgtcaccggcgtgaccgtgaccggcgccaacaccgccaccgcaggcgacaccgtcactcttacggctaccgtcgccccggccaatgcgaccgacaagtccgtcacctggtcgacctccgacgccgccgtagctacggtcaacgccaacggcgtggtgaccacgaagaaggccggcaaggtgaccatcaccgccacgtcgaacggcgacaagacgaagttcggttccatcgagatcaccgtctccgccgcgaccgtgcccgtcaccagcgtcaccgttgccggcgacgccgcgatgaccgtcgatggagagcagaccctgacggcgaccgtcgccccggccaatgcgaccgacaagacggtcacgtggaagtcctccgacgccactgtggcgacggttgacgccaacggcaaggtcgtcgcgaagaaggccggcgaagtgacgatcaccgccacggccggtggcgtgtccggcacgctgaagatcacggtgagcgacaaggccccgaccgtcatcccggtccagtccgtgaccgtgacaggcaagcaggagctcgtcgaaggcgcctccacgaccctgacggcgaccgtcgccccggctgacgcgaccgacaagacggtcacgtggaagtcgagcgacgagtccgtcgccacggtcgacaaggacggcgtcgtgaccgccaagaaggccggcacggtgaccatcaccgccacggccggtggcgtgtccggcacgctccacatcaccgtgacggccaagcccgtcgagaccgtccctgtcaccagcgtggaggtcaccgtcgaggccggcaccaccgtctccgtcggcaagacactccaggccaccgcgaccgtcaagcccggcaacgccaccaacaagaaggtgacgtggaagtcgagcgacgaatccatcgcgacggtcgacgccaacggcgtcatcaccgcgaagaaggccggcaaggtcgtcatcacggccacctcgaccgacggcacggacaagtccggcagcgtcgagatcaccgtcgtggatgagaccaagccgacgcccgaccacaagtccgtcaaggccgataccggcgacgtgaccgccggcaagaccggtacggtcaccgagccgaaggacgtggcgggctggaagagccgctccatcatcaagcaaggcaagctcggcaaggccgaaatcgccgacggcacgctcgtgtatgcggccggcgacaagaccggtgacgacagcttcgtcgtgcagtacacgatggccgacgacacggtcatcgacgtgacctacagcgtcacggtcaaggccgccgaaaccggcaagaacgacggcgacggcaagggcgacggtgtcgcgaagaccggcgccgccgtcggcgcgctcgccggcctcggcttgatgctgctcgccgtcggagtgagcgtggtgatgattcgccgcaagcactccgcctgatccccagtcagaccggccagtcgtgaccggtcggcctgactgactctttctccaccgtcccccgtcggataaaccccggcgggggacggtggcttgttgcggccggtctgccgtcgcgcgcggtgtggcctgcagccgggtgccgcacgtcacgctcatgcgcgatactggagacatgaagatttccgctgacttcacggtgatgcccgacgacttcgccaaagccgccgcgcccgaataccgcaccgacggcgtgcccgtcatctccttcccgttctatatcgacgagatcgatcccgccgcccggtacctgcactgggcgttcaccgaccccgactccatcccggtctgcggattcgaatggattcactggacggtcgcgaatctgcccatcgacgcgctgatgtacgacttcaacgattcccatgcactgcagattccgccggacttctcccggcagctgccctccatgattcccgagaccgtgcagggccgcacgtcggccgcgagcaagctggtcggcagcacgaatccgcaggtgacgatgcgctataacgggccccagccgcccgacaaggaccacgactattcgctgcacgtgtggggcaccgcgaagccgttgccgggtctgaaccaaggattctggctcaacgagctgttccacgcgctgcgtgacgtcgaccacgtcaccgatcagggtgtgatgttcatcaccggaaaagcctgagggctgatgccgtatactcccgtacggagtcatacactcatgtgacaggaggcgcgccgcggatgcgcgccgcaacgtgcacgcgacagcgtgtgcacagcaagaaaggacagtaccgaatactatggcatgcaccacgattctggtcggcaaggacgccagctatgacggttcgaccatcatcgcccgcaacgaggattccgccaacggcgaattcaacccgaagcggttcatcgtcgtcaagcccgatgaacagccgcgcgaataccgcagcgtcatcagccacctgaccattgacctgcccgacgatccgctgcagtacaccgcagtgccgaacgccgacctgaaggaaggcatctggggcgaggccggcgtcaacgaggcgaacgtggccatgagcgcctccgaaacgctgaccaccaacgagcgcgtgctcggcgccgacccgtttgtggaataccgggcggcacgcgggcgggaaggtgactcggattacgagccggccgtgcccggcggcatcggcgaggaggacttcctgaccatcgtgctgccgtatgtcaccaccgcgcgtgagggcgtgcagcggcttggcgaccttcttaaggaatacggcacctatgagatgaacggtgtcgcgttctcggacgccgacgagatttggtggatggaaaccgtcggtggccatcactggatcgccaagcgcgtgcccgacgaagcgtatgtgacgatgccgaaccagctcggcatcgacgaattcgacctcgatgacgccctcggtgagcaggagaaccacatgtgctccgaggatctggtcgaattcatcgagcgcaatcaccttgatctgtccgtcgaatcgacgtcgccgttcaacccgcgtgatgccttcggctcgcactccgactctgatcacgtgtacaacacgccgcgcgcatgggtcatgcagcggttcctcaacccgtacgacgagatgtgggacggccccgaggccgaccaccgcccggacagcgacgacatcccgtgggcccgtcagcccgagcgcaaggtgacgatcgaggacgtaaagtacgtgctcagctcgcactatcagggcacgccgttcgacccgtacggccacctcggcgacgagcacacacgccacatgtaccgcccgatcggcatcaaccgccagagccagctggccgtcatgcagattcgcccgtaccgtccgcagtcggaccgcgcgatccagtggatcgcctacggctccaacccgttcaacacgctggtgccgttctacccgaacgtcaacgaaacgccgaagtatctggaagacacgaccacgcgcgtgacttccgagaacttctactgggagaaccgcatcatcgccgcgctgtgcgacgcggcgttcgcggagacctccaacgccatcgagcgctatcaggagaagaccggcgcgatgggccaccgtctgatcgccgccaccgacgagcaggtcgcgcgtctgggcggtgccgacgaggccgcggccgccttggccgacgcggagttggaggcggcgaacgcggacggcgacgtcgagccgatggatcccgaggacatcatcgacgcgacccgtaacgacgaggtgcgcgacatcctcgccgccgccaaccagaccatggccgaccagctcaagaccgagaccgaccagctgctcgacaccgtgctctacaccgtgagcatgaagatgaagaacggcttcaaccgctccgacaactgatgcgccgagaggctcccggccaagcgttttcggccgccagccgcttcgacggtatgcaagcgtcatacatctacagaaaggttcacctactgatgactactatcgaggagttcaccagccagtacgggctggtcaagaagatcgacgccttcgggtttatgaagtacctgcacgacaatcccgacgcgccgcgcaagcacggcaaggtcgtgctcgtcaccgccgatacgccgctcaaggcgtcgcgcggcgagggcaagaccacgacgacgatcgcgctgatcgatgcgctgcgggctcgcggcatcgacgcgaccgccgtgctgcgccagccgagcatgggcatcaccgccgccggttccaaaggcggtgcctcgggcggcggcaaggcttcgctgacccaccccgagctcatcgactggggcctgtgcggtgagatggccgccatcgccgccgcgcagaacctgctcgtctccttcgccgagaaggctgtggacgagggacgtatcgacacgatcctcgtgccgcgcgtctccgaagtgccgtcccgctcgctgcgttccatcaccgtggacgcgggcaagaacaacgtcgccgagaaggtcgtgctcaccccgacgtccgagctgatgcagatcgtcgtgctgtcccgttcgatggatgagatcggcgagcgcgtggccgcgatgatcgccggcacgaaggacggcgaaccagtcaagttcggcgacttcatcgacctgtggcgcatcaccgatatgctcgccgatgcggtcaagccggcgctcaccgagacggtgaacggctcgccggtgtatgtgcatggcggcccgttcgccaacgtgtcgatcggcatcccgacgctggtctccgtggagctggcgtgcgccctgcacgatgtggtcatcgtcgaggccggttacggcaccgacgccggagcgcagaagtggctcgacatcgcctgccgcgagtatggcgcgcagtggccgtccgcggcggtcgtcgtgacccgcgcctcgacgtggcgtgatgacccggagctggcgtggcgctacccgttccacgtggaccgcttggagaagctcgacattccggcgttcccgctggtgaacctgtgggacggcgaggacgatcagattcccgaactgcgcgagaccgcggcccgtctggagctgcgcgaccccatcatcggcaacctgtatcgcgacggcggcgcgggcctgagcgaccagatcgacgcattcgtcgatgtgctgtccaacgcgtcgatgccgtccaagcatgacagccacaagggcatggccctgctggagaacgtgaagtgggtggccgagaacgcctacggcgtgccggccagccgtgtgctgctcaaggacggtttcctggattccctgggtgctgcggatgatctgtgcaaggccgccggcatgtcgctggacgatctggcgctggtcgccgtcaagtccccggccacgatgaccgacaacgaccgcgctccggaagacgagcgtacggtcaccctgaagaaggtcgaagtgcacgcaggcgccgggctggttcacgtgaacctcaccacgtccctgaccaccccgatgcccaagatcgtctgattgcggcagaggcgtaccgccggggtgccggggcacgcgtgctgtgagcgtgtgcggcggcgtggcatgcggaatcatgccgcactcgcgctgaccgcacaccctgactgcatcatcaacccctttcggattgtcggccgatcatacgggccgactggccgcaaggggctctttcatttatatatcggcaacctgtgtgccgcagaaaaggtgtcactgtgtgagggttacgtcactgtgtgcgtcctcacactccgtgacgcacccccgcaacccttgcaaaataagggttttgcgatttacgtcactgtgtgagggctcgcagcgtgacggtggtcgcacacagtgacgccatgcgcgacaatatagcggcggataccatcacacctgagctcagaagttaccgccgttccagccccagtcggtggtggcggtgtagcggatgtaggtgcggtcctcggggatgccgagctcgctgttgagcgcggccatgatcgacttggtcagcttctcccacgcagaaccgggcacggaacggccgaacacattgacctcgacgtatgcggccggggcatcgtcgctgccgccgaagtagatcggcatatcatcctcgaatgggcacatcagccagccctcggacttgccggggacggccgtgatcgccttgccgtaggcggccttcagcgcctcgcgctgctcgggagtggtcttgacggatacgtgagtgtggataacgggcatgattcctccttgattgggttcgttccctatcctaatcggttccgcggcgggcgcgggctgtgcggccatgtgtgaaatcagtggcggttcaggaaaaccgcggtgtgaagtcagcgatatgtattagacaatcaatgtgagaaaattgattgaacagctgatgaagttcggtattgtcggtgtggtcgcgttcatcatcgactggggtctgatgaacattctgctgatgacgcatatgcataacgtgctggccacgtcaatctcgttcttcgtctcgctgatattcaattacctggcgagcatgaaattcgtgttcaagcaccggccggacatggcgcgctggatggagatcgcgattttcttcgtggcggcgcttatcggctggttcatgaacgaggcgatcgtgtggaccagcacgtcgtggatgccgcatgattccatgtattccatgcacacgcggtacgtgctgtggacgaatgtcggcaagctggcagccacggtagtggtgatgatctggaacttcgtgatccgcaagtggctgcttgacgatacgcataccaatgcgatgaatcgtttgaggaagtccgagaaccgtttgagtcaggaagagctcgaagcgaagtgggagaacagcttctcgcatcggcttggcctgtggtcgctcgcgcatacgccggagggctggccgaagtagcgcggtatgcgctctcaaaactcgcagatagagtgtgttttccttcaaaaatgccttgtatctgcgagttttgggagcggcatccggcgtatcacacgctgacttcggtcagagtcggggtttcggtgctggatttgatctgccggaagccgacgaaggcgatggcaagcgaggtgatcgccagcacggtcgccatcaggaagcctccatgcgatcccatgtgatcgatgaagacacccgcgatggctgagccggctgacgagccgatcgagttcatcgcgcccatccacgccacgccttcggtgaatcgcgtgggaggcaccagatgcagcatcagctgattgccgttgatccacgtgggtgcctggcagacgccgatcagcaggtagatgatcatgatcacccacagatgcttggcgaacatgaacgtgcccacgccgagattcaccacgatgaggcagaagtagaagcgcttccacagcgggatggtccagttcttcgcgccgtacaccagtgcgccgcatagcgagctgaacgagaagcatgcgaacacgaaaccggtgtattgcttcatgttcgcttcggtggcgaacgcgatgatcgagatgttcgacgccgactggaatgcgccaagactgaaccaggtcacgcacacggcgatcaggcccggcccccagatcgactccttcttgccggcgcgggaatcggcgatggctcggtcgacggcggcctgcacggcctgctcgtcgtcgccgcgggcctcggcctctcggcgggcgcggtcggcggcgtccctctcgcgcatcctctgcgccttggcggcctcgcgcttgcggtactcctcgcgggtcagaccggcctctcgggccagctgggtctgtgatttcggctcggtcgtcagctcggtcaggaacatcagcgcgccgatgacgacgcacacgccggtgaacgagaacgccagcaggccagaaatcaccgccagcgtagaagccagcggattgccgatgatccacatgcattcatcgaacacaccggacagtgagagcgcgcggtcggtgcgctcccggtctcccttgagcatggtcgtccagcgggcgcggctcatcgcgccccacggcggaatcgcggcgaggaacggcgtcaggcagtacagcacccataccggggcgcggttggtgatgctggtggtcagggcgatggcggcgacgatccagaccaggatcgtcggaatcgacacctgccgctggccgaacttgtcgaccagcttgccgagcagcgggctggagaccgccagcgcgatcgcctggatggcggtgagcacgccggccagcgagtagttgccgtagtaatgctgtacggagatggtgatggtcatgccgaccatggggaacggcatgcaggcgatcaccgagccgatggagaaccttgcggtgtgcggcatacgcagcagttccgcgtatccgccgaataccttatgggcgacttccttgattgcagccgcgacattggcgttattggacatgacagcatctcctttccgctcccgattggatgtcccccgtcggcgtggcgttgccggcggagccctcatcgtattgatgtgttgtcctgttggtcgcgcaaaggatgctttgcatgtttgcgtcatggcaactttaatcgcgcgtcggggcgcgacacgcggtgttgatatcacgaacgcatcaattttcataacgttcataaacgacggtgatatatcggtgtatcaggtggggtgacgagccggagtcgggcgggtggagtcaggacgatatcgggtggggctgggccgtgccggggcggggcgatgttcgtcaggcaaacgccgccgcggacgcggcatcgccggccggccggtgaatgtgggacaatgaaagacagacatcacgagtcccgcaggaaggccgcatatgccgacaaccaccatacatttcatccgccatggcaaggtatacaatcccgaccatctgttgtacgagcggctgcccggattccacctgtccgaccgcggcatgcgcatggcgcaggcgacgggcgcatacatcgcagccgaccccaagctcaacgcggtcgccgcggtgtattcgtccccgctggaacgcacccgcgaaaccgccggcgccattctcgacgcgctcaacccggtacgcgccgggcgtggggaggagccgctggaactcatcaccgacccgcgtgtgatcgaagcgggcaacgagttccgcggcaagcgcatcggacatggcaagggcgcgctgtggcgcgacggcaactggaagctcgtgctcaacctgtggaagccgagctggggcgagtcgtaccggcacatcgccgaacgcgtgggcgcgttcgcgaacgagaagatccgcgagtatgccggacggcaaatcatcgtcgtcagccacgagtcgccgatctggagctaccggcacctactggagaccggccaccccgagcattggatgtttctacgcaagaccgcgctcgcgtcgatcacctcgatcacctacgacagcgatacgggcaaggtgatgtccatcacatatgccgaccctgcggcgcaagtcgagtgagtgcggcgtgcgccggccgtacaatacacagagaggacggctgcgggctcgcccgcgaaaaggtgcgcatgcggcgcgggccgggactgacggcggccgcgtagcggtcacttgtgacgacgccgcgtaacggcaacggcaggcggcgagtggccggcggtgccgttacgcggtggcccgcggtgccggcgaccggcacctggcacccggcacggcggaaggttccgcgcgccggcggacaatgaaagcgaaggagcgatatggcattccaacttgacgcgacggcgatcgcccatgtgtcgatgaatcccgcggtacgcgatgcggcggccgtcggtgccggactgatcgaactgtggccgctggccgacgccaagcagatggacaatgacacgaaatacggtgagaacctgcaggtgcggatgacccgcatggccgcacgggtcatgaccggcgacgacgtgacggtccccgatgcggagttcgtgtatgagggtgcggacgagattcccggtcgtccgcagagaatcgtcgatgcgttgctcgccgcgaatgacgcttacgacgagatgggcgactactccgaaaccggcgacacgaggctgatcatgagaggcgccggccagttgggcgtcgattgggatgatgacaccgtgcacgccatcgccgaagcgttggaggcaatcgaacaggccatcggcatgggcggtggtgccgccggtggtgccgacgccgccggtgccgccgcgcctgcgaatgctgcgcccagtgccgatgtcgaagccatcgcgcagcgattcgccacggtgacggtggcggccgacgggttgctgcgcctgatcgatctgcgcaagccgtcgcgcgcggtgccggtgatgttctatgtcaacgaactgtgcgagcgcctgtcggtgccgcggctgtgcttcaaggccgagcagctgtcgtcgctgatgaccgcccgatcgctgactaacgacgacgaggccgccctagccgaaacggtgaaattgtttactatggtcgcggcgagtgagtggaaacgtcaccatgacgacgtgctgtgggatgccgccgaggcgaagcggctcgcgaaagaggaggacgagcgccgcaacaaggaggcgctcgccgccaagttcgcgcacgtgagcgacgacccgtccaagccacccgtggagctgtgacggctgccgcctgacgtctgatgggacggggcggagacctgaaatatatgcgattcaccgctgactgctcggaatcgtgctgacctgcttgcggcgcgcccgctgaatgtggcgtacttcttccagaacctgaggaacgccttgccgaacgagcacccgtagtagggtttgtccagcggcggctcgcctgtgccgaactgagaggggccggcgtaaggactgttgccgccgtacgccggcgcggccgtatatggctgctgtggtgcggcgccggctctattcgccgtcgtcgttgaacgcgatggtgtcgtccgggccgaggagcaggcgttccgcgagactgatgatggtcagcagcagtgcggtcagtgcgaccaccatgatcgttgcggagaagatcagcggggtgcggaacgagttgaaagcggcctgcagccagatgcccaggccgttcatcgcgcccagatattccgccgtcaccgcggtgccgaacacataggcggcgctgatacgcaggccgccgaacacctggcgggcggcgacgcgcagcttcacatgccacagcgcccatgcgcgggtggcgccgcaggtgagcgccacgtcctcgtagaactgcggtacggcgagcatgccgcggcacgtctgcacggcgacggggaacacgccgaatacggcgacgatcacgattttgccgagcggctcgaacccgaaccagatcatgaacagcggggcgatggtgatgagcgggatggtctgcgcggcggcgagcagcggatagataccgcgatacagggttttggacacgtacaggccgatgccgatgagcaccccggccaccgctgcgatgagaaagccggtgattgcctcgtatgtggtgatggcggtcgcctcccacaggtcgggccaagtcttgacgatcgatgcggcgatctggctgggggaggcgagcacgcgttgggagatgtggcccgcatccacggcgatctcccatacgatgagcagcccgccgaccgtgaacgccggcggcgcgacgcgtgcgaacagggatttcagtgtgcgcatggcgtgatcttcggacaatgtgaaaccttagggatgggattgatgggggctgacgggctgacgggttgacggagggagatgggccgggtaggagggagaagagccccggaatcgttacgagagtcggaaaactcccctccgtcccgtctcgtgacggaccgaaggggagtggaggttggcccggccggctgtgacgaacctgtgctcgcggattcgctgaactgtagctagattggctgcggccggactggctgcagccggatcagcccacgtactcgttggtcgcgaggtccttggcctgcggcgcggacgcgggatcgttgccgtcctggtccttgtaggtgccggccttgtactggaactccaggtacggctgcgcgtcatcgaagttcgtggtgccgggcagcgacttcggatcgtcggtcgtccagtagttgttcttggcgatctcctccatcgaggtgcgggtcagcttggagtcgagctgcgcctccttggcctgttcgaccaggatgtcggcggccttgtccgggttggcgagcgcgtagtcgtagcccttcttggtggcggcgatgaacttcttcagcgcatccgcgttggcggagtccttgagccaggagcccttgacggcgaatcccagctggtcggggttgccgggcacgccccagtcggaggcgacgaagcagttgagcttcgggccgttcagctcgctttccacgccttcccaggtcacgtagaagccgccgaaatcacccttgccgctggtcagcgtctcgaaggtgttggtgccggccgtcgcggtcttgatgtcgccggtgccgccagcgtacttgatcatctggcggacgaccgcggtctgctcggcggagccgaagctgacgaaggtcttgccggaaaggtccttgggcgtcttgatgtcggtgcgggacgccagcgcgcaccaacgggcgaccggcttctgcgtcaggtcgaacacgaacttcaggtcagcgccctgcgagttgaacgcggcgacgttgctcagcgtggtgaagcccacgttggccacgccgttctcgacgctggtttcagctccggcctgggcggtcggcaggatctttacgttgacgtcggcatccttgtaatagccgagcttctgagccacgtacagaccgatgtggttcgtgttcggcgtccagtcgagcatgaacgacacggtcggcgtggagccggagttcttggaatcggtgttgctcgcggaattggtgtttccgcaggcgctgagcgtcaggccgagcgcgacggccccaaccatcgccacgatcttgctgaagcccttgactgtcttcatcttctgtctccttgccttctgcgcacgtcgtgcgcctgccggctgacacacgccgggcgggaaggtgaggagcccgcgcgacatgaatcagacccgtcgcatcgcagcgcgacacatatcgccttgcaatgcgtttacttctctgatgtctggcacggctgctgccaccaaccgcgcgaacgttctccagtatagcggtatgcgggggatcgcggtatgtctcgacgggcggcttcgcgcaggagccggtgtgacggcgcggcatcgggccgccatggcatgtctcccgccggtggacatgtgtttgccggtttgccggggcattgctgttttctgctgttctcggggcggactgtttccccgccgggttcatgggctacgatgctagtggctcgtgaaatggcttgtgagatcaaggaggatgccgatgatgaaggccgtgttcttcgacttggacgggacgctgatcgattccgatccgtattgggtgcgctctcaggagaccttggtgcgctcctgcggcggggaatggagcgacgcgctcgccgatgcgctgcagggggcggccttccccgagaccgtgcgtctgctgcgcggtgcgggggtcgattgggatggcgatgcaatcgtgcggcacctgtccgatgaggtgctgtgcatggaaaaggagcgtctgccgtggattgagggcgttcgcgatgtgctgtccggtctggcggcggcgcacgttccggccgtgctggtgaccggctccccgcgcgagatcgtcgagaatgtgatggcgcaggcgcctaagggcgcgttcgtcggctatgtgtgcggcaacgacgatgtgacgccgaagcccgatccggcgccgtattggcgtgcggcgtcgatggtcgggctgccggccgatgcgtcgggtgccggtcagtgtctggttttcgaggattccaagcccgggttgacggcggctcgggcgtcgggcgcgacggtggtcgcggtcaccggtcatgcgcgtgtggatatgagcgacagtgggctgtgcgatgaggcaatcgttgactatcgcgggctggccatcgccgatttggccggctggatgtgatgtgccagccagattgtcgtggcgttgcaacggtttcatgggttgttccctcatattcgcacgtgtttgggcttcgcgtgactcggtcggataacaggaacttcatccttcggtgcgaaagcggcatctgcgtttcgagggggtgatttcgtctcgcccaaacatctatctacgtttcgaggggttgatgtctgccagtatacgaagtatgaggggcggaatatcgccatcaatatagggaggattgacgaaaagcaaccccttgaaatgcagatagatgtctgcgagggctgcgatcaaccccttgaaaccgagaaagtggtgttgcggactcttttcgtgtggtggcgcttgattatgttgtggcttggctacgacatattgcgagtgcactgtcgatgatgagtgaatggcggtggggatgccattcgatgatatgaagctcgtcaagcgtggaatctccagtgtacgagcacgaatccgctcgtttgcgtccctaagtgcgcgccgaaacgatgaccgtgcgcacatagggacgcaaacaggggcatttgcgtccttatgttcgcgcgcttgtcgtttcggcgcgcacttaaggacgcaacttggggagtgacgggagtgtaggcacgtatgtgggtcttgcggcgcagcaaagatatggggcagtcccaaagaaactgggtgaaggtagcggtgtgaatgggcgcggcatgtacgaacacggggtaggtgggcaatgcgcaatcagcagaaacggtgcgtctcgggcgggaatggttggaaggatccagcgcgctgacaagtaggaggggcgggcttgcgaggcgaaccagcatggaaggagttggcgcaccgcattgactggcgggagcgagcggcggaacgaaaggggtgtaaacaaggcaacggggagtgccgcgtgtgaccgtttacatgcatgagtgtagggattgtgtgacgactcgctgtgcgcgctaacacgatttgcgttttgccagtggttgcgatatatgagtatcaacgataatttcggttgcggtgatggaatcgaaacaagcaattggagctgtataagtagcaatacaaggggacgatcatgaacaacgatcagaacaaggtcatggaccagcgcgagacccgcgaggacgagtcgcaggattgggcgacgctgttcgccggtttcgccgcctgagcgcgccgaaatatcctgaacgaggcgcacttgccggattgacgatacatcgccgtacatggaatccgacagtcacccatcggcaggacgacgcagcaaccttcatgcgcaacgccgtcgaagccgccatcaaagccggcgcttcgaccgccataccagcagccgttctttctgccatcgacggcgcgaccgtgagaccgattgaccaaaagtgagtgaaccggctcacgtcccgttgacgcggcacaatggaatgtatgactgaagctgaacattcaaaagacaccaaaccagaacttccggctcatgttcgcgtgcgcttctgcccatcgccgaccggcacgccgcatgtcggcatgatccgtacggcgttgttcaactgggccgaagcccgcgccaccggcggcaagctgatcttccgaatcgaagacaccgacgccgtgcgcgactccgaggaaagctacaaccagattctcgaatccctgcgctggctgggcatcgactgggacgagggcatcgacgtgggcggcccccacggcccgtaccgccagtccgagcgcggcgacatctacaaggatgtggccgcaaagctgctcgaagccggctacgcctatgagtccttctccactccggacgagatcaaggagcgcaacctcgccgccggccgcccggccgaattcggctacgacggttacgaccgcgacctcaccgaggagcagaaggccgccttccgcgccgagggccgcaagcccgcgctgcgcatccgcatgcccgacgaggacatcgccttcgacgacctcatccgcggcaccatcgaattcaaggccggttccgtgccggactatgtcatcgtgcgcccgaacggcgatccgctgtacacgctcaccaacccggtcgacgacgcgatgatggacgtcaacgtcgtgctgcgcggcgaggacctgctcagctccaccccgcgtcagatcgtgctgtaccgctacctgatggagctcggcatcgccaagcagatgccgctgttcggccacatgccgtacgtgatgggccagggcaacaagaagctctccaagcgcgacccggagtccaacctgttcaaccaccgcgacaacggtttcatccgcgagggtctgctcaactacttggctctgctcggctggtccatcgcccccgaccgtgacgtgttctccatggacgagatgatcgccaagttcgacgtgcgcgacgtgaaggccaacccggcccgcttcgacatcgacaaggccatctccatcaacgccgagcacatccgcatgcttgagccgcaggacttcctcaaccgttccgtgccgtacctgcaccgcgacggtgtggtctcggccgacaattgggatgcgctgaccgaccgcgagaaggtcgtcctgaccgcctccgctccgctgatccagccgcgcgtgcgcctgctgggcgaggtcgccggcatggtcggctccctgctgtccaccgaggagtacctggagcctgcggacgatgccaggaagcagctcaaggactccgccgccgacgtgctcgatgccgccgtcgccgcgcttgagggcgtggacgaggccgattggaagaccgacaacctgcacgagaccctgaacaaggcactcgtggaggatggcgggtacaagccgcgtctcgccttcggcccggttcgcgtggccatatccggccgtcgcgtctccccgccgctgttcgagtcgatggagatcgtcggcaagccgctcaccatcgctcgactgaagggcctgcgcgagcacctgtgatgtaacgcagcgcttgtgcgcatgcggaatccggcggacggctgtcgcaagacgccgcccgccgtctgctatctgcggagtttgcgcctccgctggcgggctgagccgtgaagcgaacggaggtgtcgttcgtaatcgaaggcgagccgacatacgagtagacaatactgcccccgcaggggtgtcacgaagcgactgggggagtctccgccgatcaggcgggcagaactcctccgctgatttaccgccccaaataacgctccgccgtaacatacctcccgttcttacccgtgaagttttctgttcctcgatacacgacgattctgcgatcgaccagcacgcccagttcttccccgacggtggcgagatgcctgaagaaatctggtcgcggagtcattctcgatttgatttctatgagggtggggctacggcgctgcgtagcgtctacgaggtcgatttcgctctggttggtatcgcggtagaagtacagctcgccgtctttgttcttgttgaggtatcgcttcacggtttgcgaaatgatgagattctcgaacacatcaccgcgcttggggtcgttcagcagctcttccgcagaatgaatcccgagaagatagttgagcaggccattgtcgtggaaatagatgtcgttcggcgttgacgcgtcatagaggtgaggatagccgccgcggaacatgaattcgtccgcggtgaggtcgggttccggctgaatcgcctcctcatgcgagaggggcggcagttgaagcatgcccatgcgccccgccagagattggcccaatgcgcttctccaggaggaagttttgcgagccggacagcacgtatcgccccatgccgcctcgttcgtcggccgcgacctggatctgcgagaacagtcccggagcatgttgcgcctcgtcgatgatgagtttcgcgccgtgtgatcgaatgaacccgaccgggtcatcgatggcgctgatgcgggtggtttcgtcttcaagattgacgtattcgtaatcgggcagcatgtttttgatgagcgtggatttgccgctttgacgtggccctgtcactgagacgaccgggaaccatgacagcatcggggtgagctcttgcgcgatggtccttggtagcatcattgcctcatttgcaatttcatcaatacagtgtctgataattcatcagtaggattcgtgataatccgtcagcgcatgtcttatatcgttgcaatataaggttttttgacagtctttgtggctcaattgacgtgagccgtttcgccatcctcgatgatggtcggtggagatgcagcctaacgtatctgcatcgtgccgtctcgtccgatgttaccgcataacgcttttgttgactagattggttgggatattttggagtctatcggatttcgtcggtggtcaagagcctgtcccaaaaccgttggaaatcctcgcgacacgccgtgagttgcggtgggctggatattgccgtatagtttttatctgttgcgcggcacgccgcacagcggataacttaagcccccatcgtctagcggtctaggactacgccctctcacggcgccaacaccggttcaaatccggttgggggtacgaaggtgctataatcccaatcggttacagcatctagccaaattgggatgtggtgtaattggcaacacagctgattctggttcagccattcttggttcgagtccaggcatcccagcgaatgaagctctcgcggaagcgagggcttttttgtttcccggcgcattcagccggcggattcgtggcctataggccggatccgtccaaaatacgggttgaaatcgccgaaatctactattccccgtgtgaaatcgccgtttttgaaccttaaaacggcgatttcacacggggaattgccaagaacggcgatttcaacccgtaattcagtgtcccggcccgctcaagacacgccatggtgctgtcaggcacggtcaaggtggtatgtactacgctgtgagttatgacggatttcaaccagattgcagcgccggcatccgctagcggccccgatgacgagcgcccggtgtccatctcggcgcgtctgggacgtctccagttccaccgttccggcaagttccgcgtgttgcagctggcggacatacaggatggtccgaaggtctccaaagacaccatccggctgatcgaggcgtcgctggacgccgcgcgccccgacgtcgtcatattcaccggcaaccagatcgccggatacgacgacgcgtaccgcgacacgttccgcaagcggcagtgggagccggcgcggcgcggcaagatcgagcgcacgcgggccaaggtgcgtgccggcatcagtgcgttcctgcagccgctgatcgaccgcggcataccattcgccgtcacctatggcaaccatgatgcgcagtgcgggctgagcccggccgagctggacgcgctgtaccgtgagttcccgggatgcatcaacccgccgtgcaatatggacgattccaccgcgaatcccggcttcctggtgcgttcggtgccgtcatccggtttgccggatcagccagtggccgcatgcgagcccggcacgttcgcaatgcctgtcctggatcaggatcgccaacgtgccgtgctgggtctggtggtgctcaattccggcgattacgcacgggagggcggctatggccggccgagcgacgccgcgctgcgtttcgtgcacgacgtgccgcggtggctcggcgtccgctccctggtgttccagcatatgccgttgccgcagtattatgacgtgctgaaggccatgccggcgaacgccgataacgccatacaggggtatcgcaagtacgatgcgcagtattacgtgctcgatgatgaccggacgctcccgggcggctatctgggcgaaggtgtgagctgtcctgacgaggattgcggcgagttcgccgcactgcgcgacacggacggatatataggagtggttgtgggccatgaccatcgcaatggtttcgtcggctcgctcaacgggatgatgctggtggcgacgccgacctgcggattcggctcgtacggaccggccgcggcgaatcgtgcggcaagactgttcgagttcgacatccgccacccgtacagcccgcggacgcagctgctgacattcggcgagctggtcggaaaaccgagctccaacaaggcgtacacctatgcggtcgaagggcagtcgaacgccgccgatggcgtcaatctgctgaggaaacccggcctgctcgccggggtcgccgccgcattgaagaagatctgagcaaaaagggacgcccccgctgacgggctgagtcgtcaggcattgtctgatgccaaggagcgcccccgccagcgggggcgctcccctgatccgctgcgctcgacagcctgctgggctctgcacccgtccgtcgtcggcgccgtcagcgaacggagctggccttgagcagggcgtcggtcaggtatttgccggcggccatgaccagcggggcgtaacggcgcccgggcgagttgcccatacggccggatgggccggaaatggaaatcgcggcgatgacctgaccggaggcgttgcggatcggcgcggagatggagcagacgccctcttcgcgctcgttcaccgattcggaccaaccgcgcttgcgcacggcggcgagcttcgcggcggtgaacttggcgtgcctcagcccctgatgaagccgctcggaatcctcccaggcgagcagaatctgcgcggccgacccggcctccatcgacagcatcgcgcccacgggaatcgaatcgcgcaggccgctggcgcgttccaccgcggcgatgcacacgcgctgatcgccctgacggcggtagatttgcgcggattcgccggtccggtcaagcagtgtctgcagaatcggccccgccgcggtcagcagacgatcctcgcccgctgcggcggcaagctcggcgaaacgcgagccaagcacgaatcgtccgtgctgatcgcgcagcacgaagcggtggcgctccaacgcgatcgccagacggtgggcggtcggtcgcgccaggccggtggtcgacaccagctgtccgagagtcgcgggaccggattccagcgcgtccaaaatcttcacggttttgtcgagtacaccgacgccggaatggatctctccgctgatggtgtactcgatggcgtccgctgtcatggtgctggtcacggtgccgtcgtcatgcatctcgtcgtcggcacgctgtcgttcatcggccatacttgtggccagtggttgcgtcagagaagtcataatgaagtattatgccatctcacataatgaaatgcaaaagtaacgtgggcgcttttctgttaatggcaggccggtaatatcgcgatatttgcgacaagaaccgcaaaaaacaagaataattcaagcatcgccgtgttttcgccgttttatggccatgtatttatctcatatatcggcctagggaagttctcgacgtgcccttgcccatacgcttattaccacataaaaagcgtgagggcaataccttgcgcgaggaaatttgaggaggtcccgaatgggaaccacattggccgagaaagtctgggccgaccatctggtgcggcaggggagcgacggcgcacccgatttactgtacatcgacctgatgctcatgcatgaagtaacgagcccgcaggcgtttgagggtctacgcctggccgggcgcaagccgcgtcacgtcgatcagctgatcgccacagaggatcacaacacgccgacggtcgacatcgaccgcccgaacccggacaagacatccgccctgcagctgagcacgctggaaaagaactgcaaggagttcggcgtgcggctgcacccgctgggcgacgccgatcagggcatcgtccacgcgttcgccccgattctgggcctgacccagccgggcatgaccatcgtgtgcggcgactcccacacgtccacgcacggcgcgttcggcgcgctcgcgttcggcatcggcacctccgaggtcgagcacgtgatggcgacgcagacgctgagcctcaagccgttcaagacgatggcgatcaacgtgaacggcaagctgccggcggacgccaccgccaaggacattattctggcgatcatcgcgaagatcggcaccggcggcggtcagggctacgtcatcgaataccgcggcgaggcgatccgcaacctcacgatggacgaacgcatgaccgtgtgcaacatgtccatcgaggcgggcgctcgcgccggcatgatcgcgccggacgagaccacgttcgaatacctcaagggccgtccgcacgcgcccgaaggcgagctgtgggatcaggccgtcgcctactggaagacgctcaagaccgatgacgacgccgtgttcgacaaggttgtggacatcgacgcgaccaatctcggccccttcgtgacgtggggaaccaaccccggccagggcctgccaatcaccgcgaacgtgccggagcccgacaagatcgccgacgccaccaagcgcgccgccgccgagcgggcgctgacctacatgggactcaagcccggcatgccgatcaaggacatcgccgtggacaccgtgttcatcggctcgtgcaccaacggccgtatcgacgacctgcgccaggccgcctcgatcatgaagggacaccacaaggccgagaacatccaccgcgtgctcgtcgtgcccgcgtcctcgcgcgtgcgcctgcaagcggagaaggaaggactcgacaaggtgttcgaggacttcggcgccgaatggcgcaacgccggctgctcgatgtgcctgggcatgaacccggacaagctggtgccgggcgagcgctccatctccacatcgaaccgcaacttcgaaggacgccagggcaagggctcgcgcacgcatctcgcgtcgcccgccgtcgccgccgcgaccgccattcgcggcacgatctcgtcgcccgccgacctgtaaatactgcacattggctcccgctgacagcagctgtcagtcgaagactgactgagggtggggcggagtgtcgcgcactggcgccaccccccccccagtcagcaaagccgacagccccccgccagcgggggcaagaattgaaagcctgatatccatggaaaaactcaccacattgaccggcgtgggcgtgccgctgcgccgctccaacgtcgacaccgaccagatcatccccgcggtgttcctgaagcgcgtgaccaagtccggtttcgatgacgcgctgttctacgcctggcgccgcgacccgaatttcgtgctgaaccagccagaatatgccggcaaggggcagattctcgtggccggccccgaattcggcatcggctcatcgcgtgagcacgcggtgtgggcgctgcacgattacggtttccgcgtggtgatcgcgccgagcttcgccgacattttctacggcaacaccgccaagaacggcgtgctggcggccatcatgccgcaggagtccgtcgaactcctgtggaagctgctggacgaggagcccggtcgtcagatgaccgtagaccttgagcagcgcaccgtcacctgcggcgacgtgacgttgccgttcgaggtcggcgattacgtgcgctggcgcctgatgaacggctacgacgacatcgacctgacgttgcagcatgaggacgacatcgccgcctacgagaagatgcgcgccgagaagttcccgttcaagcccaagaccatccccgccaagcattgggccgaggaacccatccagtccgcccgcgagcccgaagagagcgactgggcgggcccgctgagcgaccgcggcatcatctgaccgatctggccagcctcagccagcgatgcctttgcgccggtgttggttgagcggagtgaaacctgttaatgtcgtatccgtatatcgaccgggatgttggccggtcatgatggcatgcacgggcgtgattgtcgcccgctgcaacggaaggggcattgatggattggcatgcgtccgtgtatggttcccgctccggcggcggccagtaccgcgacttctccgacggtgatgccgacgatgacggcgtcacgtacggcgctcgcggctcgtacgccgacatggcagacgacactgccggtgccgcgccgctgacgccctccgtcgacgccgccgaactgcgccggctcggcggcaacgccgtgtattttcgtgcgaaggacgtgctgaaatccgggcgtatgcacgacatggccgtatcgttcaacgtgccggattcgccacgtacctcgggcaccatgctgacgggtgcgcgggccaatgtacgcctgacagcgctggtcaaaggcgccgaccggtacgcggacgattaccgcgtctccgccgcgatcgacaccgacgcgggcaaggtcggccagtcatcgtgcacatgccccgcatacggccggttccggggcgtgtgcaagcatgtcatcgcgctggtcatggcgtacaacgaacatccggatgacttcgccgcggccgacgacggtaacggctccacgaacggtatcggtcgcggagccgcaggcttggttccccggcaacctgccgtgcgcacgacccgcgcgcttgacctgttcatgcggcagcaggacgatgagcgcacccgcagatcgcagagccggcagctcgacctgttgaaggaaatcggcggactggctgattccggaggtgtcgccggcgcagcccagacggcgcggttcatgcccatcgccagcgtgtcgctgcggctctccttgagtttctcgctgaacagctgcgtggcgaaattccgcatcgaagtgccgtcgcgcggcatctcctatgtggtcaaggacatcgcctcgctgctgcaatccgtgaaaaaccgcgagttcgtcgcatacggcaagaagctcgcgttcgtgcactcgcgcgacgcctttgacgagcgctcgcggaacctgctcgacgtgctctcccgcgcgcaggacatccgcgccgtcatcaacaacgacaacagcgcatactcctactattaccggcgtcagtcggatgacgcgacgctgacgttgtcggacggtgaggtcgccgaactgctcgatacgtacgtcggcaccgaagacacggtggaatacacggctccggcacggttctacgcgccgacgatgcgcgtatcagtcgtggacggcaatcccgatctcggccttgcagtggaacgcggcgacgatcccgaggcctcgaacggcagtacggcggcggccggttacgtgatacggcatgcgcagcgcgtggaacgattcattgaaggacagcgctcgcattacgtgatcgcgcggccgttttcccaagccgaatcgggcgcgggcgtggggtcgggcggtcgggcgctgctgagcgtcgatcgtgcgacgatataccggtgcgatgccgattttgcgcagaaacgggcactgctgagcctgctgtgcggtgaaaacgatcgcgaggcgatgtatctgagcgaaagtgatgtggatcgtttcgtgcgcacggtactgccgcaactggtctcccgccaggagaacgaggccgggcggtcggtcgacgccattggcgcatccgacggtccgaacgcggaatacggttccgccgcgtcatcggtctttgaccggctcgtgccgccagctgggcgtgaaaccggagttccggcgcacggtggcttgatcatcgacgtgccgcccgagctgctggcgaaaatgcgcgtgccctgcaggctcgcgttttacctcgaccgcgaccgcgccggggtgacatgcgacgcgcaggctcattatggcgacaagcattaccacgtgttcgacggcgtcggcgtcgacgcgtccatgcgcgacaaggagatggagcgactcgcagtcgaggcgatgctccactatttcccgcgcccgtccggtgccgtggccgccatccccgagtccgacgacgaggcgatataccgtctgctgaccgaaggattggcggtgttgcgcggtttgggcgacgtgatggcgacgcccgcgttcgacggactgaccgccatgccgcgcccgacgatctccataggcctttcggtgaaatccgggctcgtggagatatcgccgatcgccgacgaaatcgacccggacgacgtgccgggcctgctggcgagctaccgtcggcgccgcagattccaccggctgcgcaacggctccttcgtcgacatgcgcaacgtggatatgtccgacgtcgacgagatcgcggatgatctgggactgcgggccgccgatctggaatccggctcgatcacggtgcccgcctatgaggcgtactatctggaccatcaggtcgacgacgacgcgaaggacgcaagcttcaccgcatacctggacggcctgcgcgtgatcgatccgtccacgtaccgcgttcccgctgcgctggcctccgtgctgaggccgtatcaggccgaggggttccgctggctcaatgccgtgtgcgacaagggattcgggggtatcctcgccgacgagatgggtttgggcaagagcgtgcagctgctgtcgctgctgcttgcacggcacaaggagtcccgggccgagcaccgtccgaatctgatcgtctgcccggcctcgctggtgtacaactgggtagccgaggtagcgaagcacactcccgagctgcgcgtggaggccatcgccggcaccaaaccggaacgtcgcgcgatgcttgacggcgtgcgcgccgcacagcaggacaccggtgtgtctccgacgcgggaatccgcaaggccggcatcggccgcggccgcgtccgacgacgttcccgacgtgctcgtcacctcgtatgacctgctgcggcgcgacatcgacgactatgcgggacttgagttctactgcatgacgctcgacgaggcacagtacatcaagaacgccgctaccaaggtgtcgaaagccgtgcgctccgtcaccgcagtgcatcgtttcgccctgaccggcactccgatcgagaatcggctgagcgagctgtggagcatcttcgatttcctgatgcccggcatgctcggctcgtacgcgcatttccgcgaacggttcgagatgccggtgctgagcggcgacgagaccgcgcagaagaaactgcaatcgttcgtggggccgttcattctgcgccgtcttaagtcgcaggtgctcaaggatctgcccgacaagatcgagaacgtcatcacagtgcagctgcagggggagcagcgcaagctgtatgcggcactggagcagcagctgcgctcggtcatcctgaggcagcgtccggccgatttcaacaccggcaaaatccagattctggcgcagctgacccgactgcggcaagtatgctgcgacccgcggctgatatacgagaacgccgacgggcatgccagtgccttgagcgcaggggtgcaatccgccgcgaaagacccacagcagtccgtgaaacagcctgtgaaacagtcgaaggcgcgcaagaccgtaagctccgcgaaactggacgccatcatcgaactggtggactcctgccgtgatgccggccgcaagatgctgatcttctcgcagttcaccagctacctcgacctgatcgcgcaacggctgcgggccgacggcgtggaatacgacatgatcaccggagcgacgccgaagaaacgccgtctggagctggtggaccggttcaacgccgacgcgacgccggtgttcctgatctcgctcaaggcgggaaacacgggcctgaacctgaccggcgcatgcgtggtcgtgcacgccgatccgtggtggaacgcggccgcgcaggatcaggccaccgatcgcgcccaccgcataggccagacacaggacgtcaacgtgtatcagatcgtggcgaaggacacgatcgaggagcgcatcctcaacctccagcgcagcaagacagacctcgcgcaacggttcgtggattccgcgtcctccgccaccggacggtcgatggccgcgctcaccaaggacgacctgctcgccctgctgggctgaaggtttttccccacgcaacagtcaattcgtcgcgataccatcggtgcttggatgttcgtaaaggaaaggacgtgatgagcgtgcgtaagaagctgatgagcgtggtcgccgcggtggcgacggccgctgccatgggtgcgaccggtgtcgctgccaatgccgctgatgttgttgccgtgccgcaggaggggctgtccgacacgggtgcgtcgatcgccatcgtcgtggtgcttgtcgtggtgctggccgcgattggcgtgggcgtcaccgtggcccggaagcgtcagagcgctacgggcgcacacgtgcagggcgaggacgagggcgccgccgagagcggactggtggccgatggtgctgatacggctgatacgcagaccgtgcagttcgatgatgccgctccggccgcggatgactctgacgccggttcggaggaatcccgcgactccgagtgattccggaataaccgcaatgtgcaaaaggccctcttcggagggccttttgcgttgacatggtgttttgccggtgtcccccccccagtcggccttacggccggtggtgccgtccgtaggcgaaggcgagccggccggcgagcgaataaggtcgcgcccgcaggacgggcgtccttgactgcagggcgaagggctgtcgcgaagcgactgggggtggtcccacatcgtgagtgtgattcgaggtctacgatccgacgctatctgcatttcgaggggttgattcgacggtcgcgaaacatctatctacgtttcgagggggtgccgaaacgcgatacctggagtattgagcgccaatcgccattggaaccatgccgttctggaggcgttcatacttggccaccaaccccctgaaacgcagatagatgtcccatgggactcgaatcaaccccttgaaagcgagatatcgccaatcaaggcttgaaaatgtcgcccacaggcatatcaggcccacatgagatgtcgacactgacgttgatgggcgatacacggcgtactgttgaaccatgagcatgaacgatcggcaacaggcccatgggcaacctgatgatgagatggaaccggaaggccagcggcagccggctgctggagacggaaaccccgaaaaactccagatgcctgctggtgacgctccgcagcaagttgggcagccgatgcaatggacggccggcgaaacgccgcagcctttgccgtatttacggcctgtgaatccgccgcaatccgtgaaccggcctcagccggtcggccactcgcagccgccggtggcgggacaatgggcaccggcttcggagccacgtccgatgcctccgattccgtcaggaacaggtcagccggggatgcgccagccgatccagtcgtatccgccatatccgtcacagctgtacccgccataccctccgtatcctccatattcctcggcgcaacgacccgtcgcgccgcccatccctgtcgcccagcccgtcccgatcgacccggtcaaggcccgccgccgctggttgcgaggcaccgtcacccgccacgcgggcctgatattcgcctaccagggcgtgttcatgggcgtgaacgtactggcctcgttcgtcatcggcatcatactgggcctgagcggagccgcggggcgaggaacgctgacggccgagtcgctcagcgccgccctcgtgcagctgaccggcgtgatcatgctgctcacggtgctcggcggcatgggcttcatactgccgatgcgccgcaggatgatattccgtcgcgacttctggctcggcgagcccggccatgcgcgtatgaaaccatcgtggctgctgacgttcatcatcctggtcatggcgatccagacggcgatcgtcctgatccagctcggcttctcgatgttcggcaccacgttgcaatcgcccacatccgacaacatcagcgaggcctcgaccaacatttggatgtggctgtatgtcggccttgccgcgccggtcgccgaggagctggtgttccgtggcgtgctgatgcgcggcctgaagccgctcggccggaatttcgcaatcgtgaccagcgcgctgatgttcggcctgttccatgacgatgtggtgcagggcctgttcgcgttcggctgcggtttgctgttcgggttcgtggcgatggagtattcgctggtgtggtcgattgtgctgcacgtgttcaacaacgccgtgcttggaggcgtgctgccgtggctggcgggcctgttcggcgacgcgggggacacggcgtatacgctgggacttttgggtgtttcgatcatcggcctgatcgtcgtgctggtgaaatacggcgggggattgcgcgcctatcggcgggtgaaccgcagcgcgccgggaacgtattgggggtggacgtcgcctgcgttcctaattttcgtgatcgtgaatgtggcgatcacgatactgtcgttcgtcaccgcgatgatgggcgtctgaccagcctggcagacggcctggcgaatgctcccggcgttgcgggtctgccgctgtttttacagtgggtatatcgtcgtgtttgtggcgccggcagcggtccggcgtcggttgagtgtctggagagccatgagtgatttcgagccgttttacaacgttgacttaagttatgaggataattatgcgcgcggcccgttcggcgagttcgccgcggcgctgcgcggtgatgtgccggccggcgaggccgcttcgccggcgaagtcgtcgttccttggcatccccgttgacctgccgttcggcattccggccgggccgctgctcaacgagcggttcaccacggccgcgttccgcatggggttcgacatcgccacgtacaagaccgtgcgctcgcgcgcgtgggggtgcaatccgttcccgaacgtgttggccgtgcacccgaccagtgtcgacggctcactgacgccgggcagcgccgaactggatgagggcgtgcttgcggacacggactatcgcctgccgatttccatttcgaattcgttcggtgtgccgtcccgcgacccggatgagtggcagccggacatgcgccgggccatcgcagcggccggcccggggcaggtgctgctgccgagcttccagggatcgcgtgtggagggcatgagcggcgacgactatatcgcggatcatgtcgcaaccgcacgattggtgtgcgagaccggcgccgacctcatggagatgaacacgagctgcccgaacgagggtcataatcgcctgctgtgccatgacccgcatctggtcggccgcatcaccgaggccgtcaagggcgaaatcggcgaccggcctctgatcgtcaagctggcgtatatcccgccgaccgaggtcgagggtggctgggggccggatcgccgcgtgattgacgatgccgctctggagcttatggtgcgccagaccgccgcccgcggcacggtgcaggcgttcagcacgatcaatacgatttcggcccgactcgtcgacgcgaacggcgggcaggcgctgcccggcaaggggcgcgaccgcagcggcgtgtgcggcagcgcgattcgcggggcaggccttgacatggtgtcgcgtcttgcggcgattcgcgagcggctggggcttgactatgcgatcatcggcgtgggcggtgtcgtggcgccagaggattaccgggcgtaccgcgcggccggcgccgatgtggtgatgagcgctaccggcgcgatgtgggatgccgagctggcccgcaagatcaaggcggatgactgatccgctgtatcagcgaatcgttctcaatagcgtttgtgcgagtactcctcacatttgcgaacaaaacgaacatcggcttactcgttggaatatcggccatatgcatacaatcatgttcgttttgccgacgacgggactcgcacgtttcttattgagaaccattcgctgcgacatggtaatcggcttccggcgcatttcacgtgcccgccacatgccgtatggcaaactaatggatgtgatgtccggggtggcccggcgaatgaataggagtgttgaggatggcggaatcggagaacgatgtcctgcatgtggtcggcggcaaaccgctgaacggcacgatcaaggtgcgtggcgcgaagaacttcgtgagcaaggcgatggtcgcggcgctgctcgcccccggcaagtcggtgctgaagaacgtgcccgagattcgcgatgtgcatgtggtgtccgatctgctgcgcctgcatggcgtggatgtggaggtggatggcaccaacggcatcgtcaacatcgacgcgacgcatgtgcagctcgccgatgtggcggatgtcgacacgctgtccggttcttcgcgcattccgatcctgttctccggcccgctggtgcatcgtctcggcgaggcgttcatcccggcgctgggaggttgcgcgatcggcggccgtccgattgatttccatctggaaacgctgcgcaagctgggtgccacggtcgacaaggagcacaaggacggcattcacatcaccgctccgaacggcctgcacggcgcgaagatccatctgccgtacccgtccgtgggcgcgaccgagcagacgctgctggccgccgtgctcgccgaaggcaagaccgagctgtcgggtgccgcaatcgagcccgagatcatggatctggtggccgtgctgcagaagatgggcgcgatcatttcggtggatgtggatcgcacgttccgcatcgagggcgtcaaggagctcaatggcttcacgcacacgtcgctgaccgaccgcatcgaggccgccagctgggcgtcggcggcgctcgccacgcgcggcgacattttcgtcaagggtgctacgcagccggagatgatgacgttcctcaacgtgttccgcaaggtcggcggcaagttcgaggtgaccgacaggggcatccgtttctggcatccgggcggcgacctcaagcccgtggccatcgagacggatgtgcaccccggtttcatgaccgactggcagcagccgctggtcgtggcgctcacccaggcgaatggcctgtcgattgtgcacgagaccgtgtatgagaaccgattcggcttcaccaagccgcttgtgcagatgggtgcgacgattcagctgtatcgcgagtgcctcggctcgctgccgtgccgtttccagcagcgcaactacaagcattccgctgtgattttcggaccgaccccgttgaccggccgcgatatcgacgtgccggatctgcgtggcggtttcagccatctgattgcggcgcttgccgcgtccggcccgtccaatgtgcatggcatttcgctgattgaccgcggctacgcggatttccgcggcaagctcgccgcgctcggtgccgatttcgagtaacggtacagagagcctgtagggccccgatttccgctgaaggaatcggggccttctctgtgactgattatggtcgctgaaaaggatgcaccgccgtcgtcagtcgtcgaagtgcgcgaacagcgacgcggacagcaacgccatagcgatgagcactgcgcctgacgcgatgaatatcgcggcggcggggagatgatcgaacgcccagccgtacgccatctgcccgagcggctgcatgcacatggccagcgcagacagcagcgccatcactttaccgagcatcgcatcgggcgtgcgcatttggattgcgggcacggcgatgatattcgcgcatgagcagatgacatcgccgatgcaggcgaaggccacgagcgccatcagccgcgtccagttgccgccagacagcatgcaggccacgccttgggggatgacggtcagtccgagcaatgtcaggatcttcgtcatatggccaattttcagccgtccggccatcatcgtcacgatgagcatgcccatcagggccgcgacgctgatcagtccgtcggcaatgccgtagacggtcgcgtcgaacccccattgcgtgcggatgacgaacgcgtatccgacggcgccatagccgagtacgactaagttcagcgcggaggcgagcaggaccattttcagcaggttcggtttttcccgggtcaggaaccgcagagcggccttgaggtcgtcgagtggcgtcggcatctcctcgtcgcgttcgggcataccaagccggatgaagcattcgatggccgccgcgccggcgaatgccgccacggagacggccatcatcggccggatgccgaagaacgagtacacggcgcctccgaggaagctgggtatcagtgcgctgacctgctgcacctgactgactatcgcggcgctggtgttcagcgtcgcatccccgtattggcgcagcatctgcggcagcgcggattcgacggtcggcgtctcgaagataccgagcagcgatagcgccacctgcattacgcccacggcgatgatgctgaatccggcggcggagaaccagacgagcgcgagcgcgaccgtcacggcggacgccgcgtcgaggatgaccatgagcgtgcggcggttcatccggtcggccaacacgccgccgaacggggcgccgaggatcatcggcacgaacgatatggcgaggatggatgcgaatgcggtggctgagccggtctcgtccagcacccacatcgacatggcgaagcgcagcatcatgttgccgaacagcgagatgccttgcccggcgacgagcaggatgaaattgcgggagcgcagcggatgcgcggcctttggctgcgcttgcggctgcggttgcggttcgggggaagtgttgggttgctctgtttcgtgctgtgccgcgggaagctgtgtttcggagggttgtgccggtgtggtgggcatggtgggttcctttgctgctggtggcgagttggtctcggtgttttgcgttggtggatttggcgtgagtttgatggatggcacggcaatgtattggggcggacgattttgacgccggagttggtggttcatcggcaatcattcataccgactgacggtatgtaaatcggtgctggaacaggggcgaaacattcgtgccgcgtcctgccccggagtcagcgtcgtctagtgtgcgtcgcttaccggactggtgccgcctccgtcttgttgctcggcggcgctgccgctgccgtcgccggcgaaggccatcatgccgtccgtggcgagatcgatgagatgctggtcgaagaccggcgcgtgcagcgcgtcgagcatggtggcgaggcattgcagacgataccgcagctgcgtgcgcgtggcggggaagaagcatggcatcagccaatagttgcatagcagggccagcagctgcgccacttcgcgcgggtattcggtggggatggagccgtccagctggccttcctcgatcaatggctcgaagtttttcggcagctcggttgaccagaatcgcatgttggcggtgaatgtggcgggatcgtcgaagaacggcacggtggccttgacgagcgccaggtgcgcggcgtctcccagcgagttggcgaacagcgagcggagcttttccatcgcgttcatgtcgtcgcgtttcgcgatctcgtcgcacagggcctggctggcgtgccagtcgtcggtgttcagtcgttcgaggatggcctctttggacttgaagtggtggtagatcgcgcctctcgacaggtctcccagcttatcgatgatgtcctggatggaggtcttgtcgtagcctttctcggcgaacagctttttcgcggcggcgaggatgcggcgttccgtcacctcggggtgcgggttgcgtgccatggttcctcctttcgatatgtcatcagtatacataccgacagtcggtatgtatactgcgtgtcatgattgcggccgtctgtagggccttttcggggtggcggcatcgcgcaaaatgggcaaaaccgtattagatatcggttatatgctatgttggtcaatgttgggcgttggcgcttgaccgaacgaaagaaggcacatatgacagatcccaatgccggtttccccactggaaacaactcttatggagccccgcagcccgctcagccggcttcggacgcaaacgcggcctatcagcagccgcagtacaccgcacccgtgccgcctgcccagcccgtgccgcctgcaggggcaccctatcaggcgccggcaacccccgattacgcggcgaacatccagaactccgtcgccggtttcgcccagaacctgggtggcaagaacgtgaccgtcggaggccagtcattcgacttcatttccatcatcacctacgtggccggcgtgctggcgatcatcgcctgcatcgtgccgttcgtgtcggcgtttggatacagcgccagcctgttccaaggcggggacggatggattgtcctcgttgcggttcttgccatcgcggcgctcacgttcttcaagaagcacctccccgcaatgatcatttccgccttggtgctggtactcagcatctttgagatggtgtattccaagatcaagatcaacagtagcttggacgagttcggcagcaactatggcagtctgggaagtctagcgtccggctacgcgaagaatgcggtggctctcggtattggtgcatacttgctcgtcatcgcggcgctgggcctgattgtcggcaccgtgcttgcgttcggcaatcagaagaaggccgcgaaggtcgcggtgccgggtgtttccgcccagccgcagtatgtgccgacggcattccccggtgctccggtcccggcacctgccgccccggtgtccgatgccggcgttccgcaggctcccgctgcgccgcaggccccgaccgcaccggtcgcctcgactgcgtatgagcagccggcgcctgccgctccggtttaccagcagcccgattcggacgcttcctacccggggcaggccccgcaggcctgatttctaggtcttccgcgttccgcgcctgatcggcgtgaagcgtgaccaatgagccgctgtgcacatgcatagcggctcttcacatatgcgacggatccgagcccaatgaccctgccgataatccgggaaatatgaacggccgcacgcacccgcgatgccgcgatattgtccgctctcataggcataatagaaaagttgtgtctggaggatacgtgtatgcgaatccgctagcacagcacagcaatatacgttgcgggaggaatccgccgcgggcgaccgccgcgggtgccgacatcaccgcttcatagaaagaagaaccatacaatggctcccaagaagaaagtctcggcgctgatcaagctccagatccaggctggcaaggccaatcctgccccgccgctgggtccggctctgggttcgcatggcgtgaacatcatggacttctgcaagcagtacaatgcgcagacgcaggacaagatgggtcaggtcatccctgttgagatcaccgtttacgaggatcgctccttcaccttcattctgaagaccccgcctgcagcggctctgctgctcaaggccgccggtatccagaagggcaccgaaaacccgctgacccacaaggtcggctccgtcaccaaggcgcagctgcgcgagatcgccgagatcaagatggctgatctgtccgcccgcgacgtcgaggctggcatgaagatcatcgcgggcaccgctcgctcgatgggcatcacggttatcgactgagaggagaaggacacatggttaagcgttccaagaagtaccgcgaagcggctgagaaggtcgatcgcaacaacctttacaccgccaacgaggctatcgctctgctcaagtccatgccggcctacaacttcgaccagaccgtcgaagccgtgtaccgtctgagcgtggatccgcgcaaggccgaccagctggtccgtggcaccgtcaacctgcctcacggcactggtaagaccgccaaggtcgccgtgttcgcccgtggcccgaaggccaccgaggctgtcgaggccggcgccgacatcgtcggtgacgacgacctgatcgagaaggtccagaacggcttcctcgacttcgacgccgtcgtggccaccccggacatgatgggcaaggtcggtcgtctgggccgcgtgctcggcccccgtggcctgatgccgaacccgaagaccggcaccgtgaccatggacgtcaccaaggccgtcaaggacatcaagggcggcaagatcgagttccgcgtggacaagaacggcaacctgagcttcctcatcggcaagctctccttcgacgagaccgctctggacgagaacttcaaggccgttgccgacgaagtcaagcgtctgaagccggccaccgtcaagggccgttacatcacgaaggtgaccatcacctccacgatgaaccccggcgtcccggtcgatccggtggctctcgcctgatcaacgccaatcggctcaaccttcatagggggcttcccgcacgcgcgggaagcccccttgccgtatttcgattccctactagactccccagtttcgctgcgcttgacagccagcgggggcaaagtaaaccgcccgccgctggtggggctgtcagtctttgactgactggggtggttcttgccgccgcatatacaaaagccgcccggcacacacatgcgccgggcggctttcagctactgtcgcggtcgcctgtcagtaggcggccagaatatcgactacgaagatcagcgtggagttcgcggggatggagccctgggcggtgttgccgtaacccaagttcgacggaatcaccattagcacctgcgagccgaccgtctggccgaccatggcctgctgccagccctcaatcacctgatggttgccgccgctgtacgtgtcggcctcaagcgtggtgttcttgtcccatgacgagtcgaactgggtgccgtccaacagccatccggtgtacttcaccttgacggtgttgttgttcgtgacctctttgcccttgcccttgatcagcgcctgcgagaccagcttgctgcttcccttgtacccgttcatgttgatggacggcttgccgttcttcgctcgcgtgaccttcggcagatcagacgggatgtcggtgacctcgtcgcctgtggccttggtgagatccttcgacttggaaacgtaggtcagcgccatgatgtacgacgtgccgctggagttggagtcattgacgccgtacgcgatcgtcgtgttgagcttgcggcccttcagcagctcatagtaggcgtcgctcaccgtgcccttttccagcaccagggagcaatcgggtgtgttcttctcccagctgctcgcaagctcggtgccgtccttgacgctgatggcgatgccctgcgagcacagacggtcgccatcagcgatggtggcgccgttgccttcctgcagcacggcatagctgttgttgtcgacggtcttcggtgccttgaaggagaccttcggtttctcgcccagcgtacccgtggcggtgatgccggcgatcttcttcatgttcttcagtgcgctggagtcggaggactgcgaggagtcgtcgccggatttctttgacgacgagccggaatcgccggagccgcacgcggcgagtgtgacgcacaggccggccgtgcacacggccgcgagtacgcgcttgaacgtggatgtctgtgtcaacttacgcatggtcaccacactagcggaaaaccctgatttttctttggaaacgtctttttcgccggggctttatgccctgcattgtagaatgggtgagttatgaagaaacagacatcaaaagagcgcaagcgtgacgagcgaaagtccaagtcggccgcccgtccgacgcgccatgcccgcatcatgcggggcgtggtgacgcccatccttggtcttctggctgtggcatgcattggtctgggcattatgaacgccacatattggaagcccagctctcagatcgcggccagtgccgcggtgaaggggacgcaatatatcgttaccgatcccggcgtgctgccgctggtggacaatcaggtgacggtttccgccgatgccggttcgtccgacggcgaagtatgccttgctctggggtcgaacaaggatgtgatcggttggctcgccagacagccatatgtgcgcgtcaccggcttgaacgaatggacgacactcgcgacgacgaaggtctccgcgcagggggccgcggccgatgcgggcgatgacgcagtggcgttcaaggactccgatatgtggacttccgtgacgtgcgggacgggcaccgtgaaagcggagaccaaggtcgcgtccgacagcggtaccgtagccatcatcgacttgggcaagtcctcgaacgcgacggtgcgcatgaactgggtgcgtcagactctacctgatttcgccatgccgttctatttcgccggaggactgctggcgctgctggccgtactggccgcatctctgttcgccatgccgccgcacaagcgtcgcaagcgcgtggtgagtggttccgcagccgaaaagcaggcagaggaggtcgccgtttcgcaggcggtggcgggcagtgtcgcgagtctcaaggcggcggtcagtttcaagccgaaatccaagcgccgccgtcatgccgcgcatcgtgggaaacccggtgcgggcacgccggcaaagccggaaatctcccagccgaaggtcgtcgatcccggcagccgcaaccttgtcgccgaccagcagaacgcacaggccatggaccagcccgacgattcggcgacgtcggtaatcaccgccagcgagctgcagacgtatttcgcgcggctttcgcaggaatccgatgatgacacgaaggggagctccaatgaataaacgcataaccaccgccctggcggcgacgatggtctgcgctctgacgctcggccttgcaggctgcgaggggcaggtgccacagaccgtggcgccgtcggtgaaggacaacgagatcatcgatgtgaccgtcgcacaggagaagcagatccgcgggaagatccttgacgtgctgaaccaggcgaacgaggcgaaaagcgccgacgggctcgccgcgcgcgtgtccggctcgcaactggagatccgcaccgcccaattgaacattgcgcaatacacgcagcaggatgtcacgccattagcgactatccccagtgatgtgacgcaggtggtcatcccgaccgacaacgcatggccgaggtatattttcaccgtcaccaccaccaccgaggaccagcaggcgaagcgtctgctggtgatgcggcaggagtccgcccggcagaactacaagctgtgggctgtcgcccgactgcttgaggacgtgtcactgccgggcttcgcgcccgctaagcagggcaatgtcatgggcgatgccaacgactccaatctggtcatgacccccaagcaggcggtgcagcgatacgccgatgtgctgcagaacaacacgaacagcaaatacgcgggaagcttcgaggacgaccagttccgccagtcgctagtcaagcagcaggaagaaagccagaagggtgtgacccagaacaagggcacgcagcaggaggtgttcgcgccggtcgtcgaccagatcgccgtgatgcgctcccctcgtggcggtgacctggtcgtcgcgcagatcaactcggagtggacacggtccatgagcgagggccgtgagtcgttgccggggtccccgaacgaggatgcgctgttcaagatgacgaatcagaaggccaccagttcgctgaaagccacttatgtgaacgttgtggcgatattcgtgccgctggccgggtcggatcagaaggtgaccgtggtggcgggcgatcgtcaggcggtcaaggtcgaggcgcagtagacgccggactcgggccggcgtgcgggccggcgcacggacttgccaagcaccggaatcgggcgcttgcagcgtaaccggaggcggtgagacgccgtggcctatatagtggtatgcgtcaacgatgttcgcgacggaatcgacggtggtcgcaggtatgcggtcgcgccgattttcgcgcggcatggatgtgacggaacggcgtgcggcgcagaccgcgggccggtatgagtcgtgaaaacggaggcatgatggcacagcagcaggagtttcatccgggattgtcactcgcgggcgcggtggatctcgaatcgttgaagcatcaggtgaaggcggagccggggcaggccgggggagcgccggccgcgggcggctatgtcatcgacacgacagagaacacgttccaggcgatggtgcagacctccgccacgttcccgatcctgctgctgctgtggatcccgaccgatgaccgtctgttcccgatggcccgtacgctcggcgacgcggtgaacaagctcaaggggcagattcagctgtcccgcatcgacatcgcaagctacccatcgatcgcgcaggcgttccaggtgcagggcgcaccggcgctgttcgcgctgatcggtggccgcccgatgccgattcttcaggggctgccgggcgatgacgagctgaagcagatcgtcgatcaggtcatccccaagctcatttcggtggccgcgcagtccggcgtgaacggtactgcgccgtattccggcgacccggactcggccgacggtgacggtgctggtaccggtgacggcgcaggtgcggcggctggtgccgacgtggtgccgcccgagcatcaggaagcgcaccagcttgcggcgcagggcgattacgccggtgccgccgcggcctacgagcaggtgttgcaggcgaaccccaatgacacgctcgccgcgcgggagcgcgcgaaggcgctgctgttggcgcgttcggcgaccgctgacgtgcgcgaggtacgcaaggccgccgcagatcgtcccgatgacgtcgaagcgcagctggccgtggcggatgtggacatgatcggcggccagatcgaggacgccttctcccgtctgctggattatctggcggacggtcacaccgatcaggtcgagccggtacgtaagcgtctgctggagtacttcatgattcccgaagcgaccgatgagcgcgtcaagcgtgcccgtcgccgccttgccacgctgatgtactgagcgccatcgcgccgaaatatgtcattatgctgaaaccgccgcggtgccaattcttgcatcgtggcggtttcagcggttttgggcctgtggtctacgccttatagtcccatgcggttacggccgaactgggtttggaatcggggcccgtcccggtgcagctcggcgtcgaagtccgcggcccactgcgagaacggccgcgaagccagtccgtcgttgctgaaccgcgcctgatcggtgatctccgtcacgcagaacgatggaatctgcagattggtcacgggtccgctacgctccgcctcggcgacgaccagtggggcgttcgcgccgccaaatatgtcgaggctccatccatcctcgccgatccatgcggagaaccggttcttgataatcggacggcctccgcgcatcaccagttccgcggctatgcaggcgtcgatctcccgttcggcctcataacgggtgccgcccaccgacggccccttgacggtgacgaacgcctcggtgaaccggtctcggtattgcctcagtacggctatcggatcggtgtcggcgttcatatcgatgcgcaccccgcgtgtctgtagccgcactcgcaacgcgtaattaccgtcgtgcacataatagctctgcacgatcagcatcggctcgccgtcatccagttccggcggcagcgccctgcagaagaaccgacgttcatattcgaaatcgttcatggcgatgtccataccactccagtgtagtcggtgcgggagcgcgtaaacccgggaattccgcgaaattgccgacatgttgggagtgggatggtgtacagtgatacagttgcttgccgcaaggcgagcgatggctcgggttcgtagctcagtggatagagcgtctgtctccggaacagaaggtcgagggttcgaatcccttcgagcccaccagcaaaggctccataccatcggtatggagccttttttcgtggtctatctgcgtttcgagggggtgattcgggatgcgccggacatctatctgcgtttcgaggggttgatagccaagtataaacgctacgggaaccgcatgattccagcaagaatcaggtcggaatactctgcatatcgttttttggcaaccccttgaaacgcagatagatgtccccagactgcaaaatcaccccctcgaaacgcagataggagatgttgcggcgaaagccggtcgcggcggttgtctccgcctcgcgaccggtcagctcttcttgggggcggtggtgctttcgcggacgaccaggcgtgtgggcaggatcaggtagtggtcggcgacggagcctgcacgcgcgtcgagaatcatgtccacggccttgcgggcgatcatgtcgaacggctggctgatggtggtgagcgccgggtacaggtattgtgccgggtacacgttgtcgaagccgacgaccgacaggtcagcgggcagggacaggccgcgttggcgggcagcgcggtacacgttgagcgccgtgatgtcgttgcatgcgaagatcgcagtcggccgtttggcggcgggcaggtcgagcagttggcatgcgcactcgtagccgcgttccggcatgtagtcgccgtaggcgaccagctcggggtccagctggatcccggcgcgacgcagcgcggtggcgtagccactgtagcgggcctgagcggattctgcgttctgcgggccggtgatgatgccgatgcgctgatggccgagtttgatgaggtgctcggtggcgatcagcccgccggtccagttgtcgatgcccacgccgagcgtgtcctgcgacccttcgccgatggagtcgataatgacgaagggaatgttgcgcgaacgcaatagtgttttttcgcgttcggtcgcgttggacagcagcaaaatgacgccgaggggattgcggttgaggatttcccggaagctttcctcgctgcgcttgccccgcccggtctgcgtgatggtgatgccgatgggcatcgatttcacatattcggaggtctccgcgatcatcgcgttgatgccgttcgccatgacctcggtgagcacgagctcgatggtctgtgatgtcttcgtggtgacgagagacttggagtacccggattcctccatgattttctcgatgcgcgcccttgtggagctggatacgccctctcgcccgttgatgacctttgatacggtcgcggtggagactccggcaagcttcgctatctcactgactcgcggttttttcatatcgcctgccatcggttgctccgtttcttccgtacttcattgtgggtgtgtctgcgttcgttgcagacgcacttcacactatagtaaagcgttccgagatagatgaaagaaaatttctagaataagtggtgatttttctaaaagatgtgtatgatgggaacgaaacacaatacatcgagaaccattgaggcgaaggagccaacatgggcaccatcatcggagtcaaaacctacgacctgcgtttccccacgtccagcacgctgtcgggctcggacgcgatgaacaaggaccccgattatcctcggcatacgtcgtcatcaccaccgacgcggatggcggcctgagcggcagcggcttcgttttcactgtcggccgtggcaacgacgtggtcgtggctgccgtcgactcgctctcccgcatgctcgtcggccgcaacgtcgagaacctgctcgacgacatgcgcgccgcatgggacatgttcgtccacgactctcagctgcgctggctcggcccggagaagggcgtcgagcacatggccatcggcgccgtgctcagcgcgccatcgacccgatcgcggtcgccaacggcgagcagatgcagaaccgcatcatggacaagcagtatctgcaggcgggcagcttcaaggtcatgcagatcgacgccacgcgcgtcgccgggccgcaggagatcgtgctcgaatacctgctcgccaacaagttcggcgtgcgcgtgtgcccccccacgccggcggtgtcggcctgtgcgaggcggtgcgccacttcgccatgttcgattacctggcggtcagtggacaatgggatgatcgcgtcatcgaatatgtggacaaccagcacgaatacttcgtgcatcccactgagatcgtcaatggtcgttacaaggccccgaccgctccgggctcgggcgtcgacatgaaactcgaagccgccgaacggtgcctgtacaagggctgatcgcagcgccgcggtgccgcggctcgcacggacacgaacacaacaaaggacactgaaacatcatggatttgcatctggaaggcaaggtcgtcatcctcaccggcggtttcaagggcatcggcaagggcatcgccctgcgactggccaaggaggggccatcgtggcggttatcaaccgagacgacggcgccgccgagcagttcgccgccgaaatgaaggccatcaccgacaactaccgcacgtatctgatggacctcaacgacaccgacgacatcgcgccgatcgtcgaggatgtggtgaagacctacggccatatcgacggtctggtcaacaacgcggaccgcaacgacaacctcgacctcgaccacacctcgtggcgcgaattcgagcagtcgctgcacggcaacctcacgcactattatgagctcgcccaccgctgcgccccgtacctgcgcgaatcgaagggcgcgatcgtcaacatctcgtccaagaccgcgctgaccggccagggcaagaccagcgcctacgccgccaacttgctcgtgttcgacgcctccaagggcgtccacttccacgacgaggtcttcaaggacaccgtctacttcatgaacaacgtgttctgcaacacctccaccacgccgacgcagtggtaccgcaagaccgacgcgctcgccaaggccgcgttctcgaacaacgactactacgaggccggcggcaaggcttcggacacccagcctgaggacaagcgtggtctggaagtcgacccgaagttcgtcggcttctccggcggctccgacaccccggccggcaagctcgccggcgtggcgccgaagccaaggccaacctcgacaaggcatacacctcctccaagctgcgcgtgagcctcgactccgtcaaggccggcgtgcagtgggcgccgacgatgagcgagatccaggtgcacaacggctccggttctgcctcctcgcacaagccggctgtcgccgtcgtcaacagcaacttcaacaagcaggctcctgagacgctgcccgagtacaccgtcacgctggacggtgacaagctgcagtccatccgctggatcggctccgaaggcaacgtgctgagcagcctcgacgagggagactacacggtgagcggcgagggtgacaagatcacggtgaagatcgccgccgacttcctcaagggcaaggacgcgggcaactacggtctgcagttcgagtttgcgtccgtcgccacccgcaaggtgtcgctgaacgtgaccgacgaggcagtcgagccaagcaagccgacgactccggccaagccgggcgctaacgagcagccgaagaccgaaggcgtcgcgaagaccggttcgtccgtgcccgccgtcgccgccggcaccacgatgatcgtccgcaagcgtgccactcgctgaatgacacgccgtaaaggccggggccggtaactatgtgccggctccggcctttgccggtacgatggatataatggatgtcttgccgttgcgataacgccgcggcagacaaaatagaagaaacgttccagagcacagaaaggaacattgatgtcaacttctggccgttttacgattccgagtgaatcgaacttcgcggagaagaccgcggaactggcccggttgtggggtgccgacgcggttcgcaactcggatggcacgcagttggacgacgaggtcgtggcgctgggtatgaaggtctacacggcctacttcccgacccgcgcgcacaacgagtggatcacgctgcacatggacgagaccccgcaggtgtacctgctgtcgaagcgtgcgctggcggagagcgacacggtggacgtgtctctgatggacggtttcttcgaggagcagctcaagccgaacttcgacgccgacccgcacaagtactgggaagtcgtggaccgttcgacgggcgccgtggtgccgaccgagcagtggaccgtggacgccgaagcgggcgtagtgcacgtctccggcgcggaactgatgcacgagtacacggtctcgttcctcgcgtacatcatctgggatccggtcgagatgtacaaccacctgacgaacgggtggggcgacaaggagcacgagattccgttcgatatctaccacccggcgacgcgcaagttcgtgttcgacacgttcgagcagtggctcaaggacaacccgcaggtggatgtcgtgcgtttcacgacgttcttctaccagttcacgctgctgttcgaccagaagcagcgcgagaaggtcgtggactggttcggctgcgcctgcaccgtgagcccggccgcgctcgacgacttcgagaaggagtacggctaccgcctgcgtcccgaggacttcgtcaacgagggctcgtacaactccgcatggcgcgtgccgcgcaagccgcagcgcgactggatcgacttcctgagccatttcgtacgcgcgaacgtgaagaaactcgcatcgctgtcgcatgaggccggcaaggaagcgatgatgttcctgggtgaccagtggatcggtaccgagccgtacaaggatggtttcgaggatctgggtctggatgctgtcgtcggttcgatcggtgacggcaccacgacccgcatgatcgcggacatcccgggcgtgaagtacacggagggtcgtttcctgccgtacttcttccccgacacgttctacgagggcaacgacccgagcatcgaggcatgggacaactggcgcaaggcccgtcgtgccatcctgcgttccccgatcgcccgcatgggctacggcggatacctgtcgctggccgcgaagttcccgaagttcgtggacgcggtggagcacatctcggatgagttccgcgacatccacgaccgcaccgacggcgaggcggcccgcggcgtgctcaacgtggcgatcctgaactgctggggcaagatgcgttcgtggatggcctacacggtcgcccacgcgctgccgaacaagcagacgtattcgtattacggcattctggagtcgctgtcgggcatgcgcgtgaacgtgcggttcatcagcttcgatgacgtgctggagcatggcgtcgccgacgacatcgacgtgatcgtgaccggtggcccggtcgacaccgcgttctccggtggctcggtgtgggccgaggagccgcgccttgcggcgacgctgcgtgcctgggtgcacggcggcggcgccctgattggcgtgggccagccgagcgcccagcagttccagggtcgtttcttccagctggccgatgtgctgggtgtggacgaggagcgtcaccagacgctgtcggtggacaagtacttcccggccgtcacgccggagcacttcatcaccgccgacgtgcatctgggcgaaggtgtgctgcagggcttcctcgacgccggataccgcaagcccctgtcgggctgcggcggcggtcaggcgatcggcgagcttggcggcatcgacttcggcgagccgatcgcggacacgttcccggtcaacgaggatgtgacgctgctgcgcgccgatggcggtcaggtgcagctcgcggtcaacgagtacggcaagggccgcggcgtatacgtctccggtctgccctactcggccgcgaacgcccgtctgctggagcgtgccctgttctgggcctcccacaacgagggcaagtatgcggcatacagctcgtcgaaccccgagtgcgaggtcgcggtgttcgacaagtcgggttgctactgcgttgtcaacaacacggatcgcgcgcagtccacgtatgtggagcgcggcgacggtcgcatcgagcgcatcgaactggcgcccagcggtatcgcctggcgcaccatctgatccggtcgcatcatcgctccggatcggcgtgaacgagtgaatatcggggtcatcgtcgcctactccttcgacgatgaccccgatttttcatgccgcctgtccattgtgcgtacatgtacgcatcaccggatgggcggcataggtatatttattacacggtaagcgtgcacaagcgcgtcgcaacgcagacaataatcgcggatacccgcggggaatgaggagtcatgagcgagaagatggaagcggtcgccacgtcggaggcgcctgtggcgctgggcgcgtacagccaggcggtaaaggccaacgggttcgtgttcgtgtccggccagctgggcatcgaccccacgaccggcgaactggccggagacaccgccggtgagcagaccgcccaggcgctgaagaacatcaagcagattctcgacacggccggcaccggcatcgagcacgtcgtgcgcgcgacgatctacatgaagaacgtcgaagacttcaaggaagtcgatgcccggtacgccgacgtgttcatcggctccgtcaagcccgcccgcgttgccatcggcggcaacgacatccccaagggcgccctcgtcgagatcgacgccatcgcagttctgtgacggttcgcggggaatccgaacagtaacccgccttcaaccaaagccgtagcagtgagcctccaccagatgcatgatggaggctcactgctgtgagtcgtattgcataaccatgttgcgccaatgctgatggttccgtcggatgtggcgtatatgaaggtgatttgcgtccgtaagtgcgcgccgaaacgacgaccgtgcgcacttacggacgcaaatcgggccttttgcgtccatatgttcgcgtacttgtcgtttcggcgcgcacttacggacgctttgggagcgccccccaatctcgctccgctcgacagccccctgtcagcgggagtacgaccaacgctcccgctggcggggctgtcgcaaagcgactgaggtggttcacacgtgacacgctatatagagtcatcaaacgtgtcttccaaatcatctccggccaatccaccgcatatgtgatgcggtggtgaaggagtgacgcgaatcaccctgattcttaccctcgaatgccccgaacacagctgcgcggcctatgatgacctgcaccaatggcgttggcgcgactatgtcgcgcggcgaaatatggaagcggggtgtgagatgcacgggcgcgaaggacgaggacggctgtccgaatccgttgtggcggtggtttccgtactggcatgtatcgccatgcttgccggattggtgatgggcacgacgcatgtggtcggctgggtgttcgatgcgatcggactggcgtcgccacagcaccgcccgatcgtcatcgcgcatcgtggcgacacccggcatgctcccgagaactcgctggcttccattcgcgccgcaaagcagaacggcgccgatttcgccgaaatcgacgtgcggctgaccaaagacggcatacccgtggtgttccatgaccgcagaaccgggcgtctggacgcgggcggtcgcaacgtgctggtgaacagtatgccgttgtccgcattgcagcgcatgatcatgcagcaacgcggcatgcggtattcggttcccacgctgcgtcaggcgttggacgacgcttccatgtcacgtccggggcagcggcggttcggcttgctgctggacatcaagacggacgcgcggtatgcccggaaagtggccgatgccgtggtgcgtgtggtcgaggattccaaatacgccggcaatctgatggtgatgtcggccaatccgtatgcggtgatggtcttcaagagcatgcgtccgcagtggcatgtaggcctgtgcgccagcggcaggcccgatctgacgcaatgggatgatgacggcacgagcgaagcgcggttcatggacggggccgcacgggtcgagaccgtgcgccgcgaagtgacggcgaagcgcggcggaaagcagcgaaagcatcccatgttccgtggaatgcgcggcgaggccatggacttcgtcgtgttccgcgcgcgggacgtcacatcaagactgctgcggaatgcgcggctgcgcagaattcccgtatatgtcgactcggtggattcatacgatgccgcgaacggcctgctgcgccacggcgtcagcggactgctcggcgagaacataacgccgttgcagcaggcttgttcgtcatatcacgggcttcccgaaccgttctcgtcgccggacgatgacgatcgctcccaggcgtgacgccggccgatcccgcgtcggtgcatgaaccggacgttcgctgtcaaagtgcccggtacactagggagaatgagtcctgaagcgcttagtgaactgattgaaaccattgcccacgatctggtcgccgccggaaaagccggtaccctgaccgacgatttgattcctgaaaccgccaaattcgccgtgatgcgcccgaaggagcgcgcgcacggcgattgggcctccaacgccgccatgcagctggccaagaaggccggcatgaagccgcgcgatttggccgagctgttcgccgagcggctgaccgccgccgacggcatctcgaccgtcgaggtggcggggcccggcttcatcaacatcacgctggattccgcctccgccgccgcggtggtcgacaaggtgttggccgatggcgcaggttacggcaagaacgtgcacctcggcggcaagacgctcaacctggagttcgtctccgccaacccgaccggcccgattcacatcggcggcacccgttgggccgccgtcggcgactcgatggcccgcgtgctggaggccaacggcgccaaggttgtgcgcgaatactacttcaacgatcacggcgagcagatcaaccgtttcgcaaagtccctggtcgcagccgcgcacggcgaggagacgcccattgacggatacaagggcaagtacatcaacgagatcgccgaccgcgtgatcgccgaggcggaggccgatggcgtggatgtgctgagcctgccgcgcgtcgacggcggcctcgacaaggacggcaacccgctcggcgagggcgattccgagcagcgcgaggagttccgcaagcgtgccgtgccgatgatgttcgacgagattcagcgctcgatgaaggaattccgagtccgcttcgacgtgtggttccacgagaacaacctatacaaggacggagaagtcgaccgcgcgattgaggagctgcgcagtcgcggcgacatcttcgagaaggatggagccacctggtttgaatccaccaagcatggcgatgacaaggaccgcgtcatcatcaagtcgaacggtgacttcgcctacttcgctgccgacatcgcctactactggaacaagcgtcaccgcgctgtggatccggccgacgtggcgatttacatgctcggcgccgaccatcatggctatatcggtcgtatgatggccatgtgcgccgccttcggcgacgagccgggcgtgaacatgcagattctcatcggccagctggtcaatgtgatgaagaacggcaagcccgtgcgcatgtctaagcgcgctggcaacgtcgtcaccatcgacgatctggttgaggccgttggcgtggatgcggcccgttactcgctggcccgtaccgactacaacacgtcggtggatatcgatctggatctgctgacttcgcattccaatgagaacccggtgtactacgtgcagtatgcgcacgcgcgttcctgcaatgtggaccgcaacgcggccgctgcgggcatcggtaccgaaggcgctgacctgagcctgcttgacaccgaggcggacggcgaggtgctcgccgcgctcgcccagtggccggcgactttggctctggccggcgaccagcgtgccccgcacaaggtggcgcactatctggaggatctggccggtgcctaccacaagtggtacaacgtcgagcgcgtggttccgatggcgctgaccgaccccgaggagcgtctggatgacgccgctcgcgaggcactgcgcatcgccaagaaccccgaaccggcacgtgccgccgcacgcctcaagctcaacgatgccgtgcgcacggtcatcgcctccggtctcgacctgctcggcgtcaccgcccccgacaagatgtgacctaggctgcccctggtcgcgcgtagcgcgactgggggcagttctcattcaggtactctccgaccgagcctccgccttatggtcgggaagtggtatcacggtgccggttctggcacaatggcacagtaataggaaaagcggcaagccctgagcgaaagaggagcaatgactggatctgctgtgcgtgtggacggaacgcaaggtatcacccccatctggccggtggcgacggcagtgaatgccgaaggcgccctgacgttccacgggcgcaccgccgagtcgctgcttgacgagttcggatccccgctgtatctgatcgacactgacgaagtttccgcccgcgccagatatttcgtgtgcgcggctgccgacgccttcaccaactccaccacgcacgtgagtttcgccggtaaggcattcctctccaaagaagtcgtgcggttggtgaccgatgcaggcatgctcgtcgacacatgctcgatgggggagatgcgcatcgcgctcgccgcaggcgtccccggccgtcgtctggtgctgcacggcaacaacaagtccgacgcggaaatcgaactcgccatcgagcagggctttgcgaaaatcgtcgtggacgagccggatgagccggcccgcatcgccgccatcgcgcgacgactcggcaagcgtgcccgcgtgatgctgcgcgtgaccgccggcattcacgccggtggccacgaatacatctccaccgcgcatgaggatcaaaagttcggcgtgccgctgctgccggccggcgccgatgccgcggcactcagcgtactggacgaactcacggctgatccagcaggcgtgacgccggctgctacgaacgcgcacatcgccgaacgcgatggtgatgccggtgacgggaatgcgaagcccgagcgcgaactgcactacgacgtgaagtacccgtacgacctgagccacgaggagatccccgaaaaggacaaggcgctcgccgccgcgatggaaaccgtggcggatgggccggcactggccgtgctcaaggacatcctcacacggtccgacgagttggaactcgtcggcattcactctcatatcggttccaacatccatgacgcagacgccttcatccaggccgccaagcgcatgatgctgctgcgcaagaccttctacgccaccgacgcctatacgctgcccgaggtcgacttgggcggcggctactccgtggcatacaccgacggcgaggattcgatggacgtgcgcgtcgagctgcgtcgtctcgccgaagcggtcggtgccatcaaccgtgcgctcggtgtgcccgcgccggccatcagcttcgagccaggacgatggatcgtcgccccggccggcgtgaccctgtatcgtgtgggcacgatcaagccggtgcatctgtccgacgccaaagacaagaccggcaatcccatcgatgagcgcgtgtacgtgtcggtggacggcggcatgagcgacaatattcgtccagcgctgtacggcgccgactacacggtccggctggccaaccgtcgcgggtcggacgagtcgatgctggtgcgcgtagtcggcatgcattgcgagtccggcgacatcatcgtgcacgaggacaggcttccggccgacctcaggcgcggcgacatcctcgccgtgccggtgacgggcgcatacggccgcacgatggcgagcaactacaatcaggcgctgattcctgctgtggtcgccgtgagtgaagccggcgcacatgtgatgatccgtcgccagaccattgacgacctgctggatctggatcagggctgaccgttcagcgccagcggcaagatataaaagcaaaagcagtagaactcaaaaaaaggagtcctccccggctatcagggaggactccttattgtttgttgcggttgtgtctaccgaatcacttggtgacgatggtgccaatcggagcgccggtagccaccgcacccttggcggtgatcgacagcttatcgatcttggccgggttggtgaacacgacgatcacgtcggtgggctttccagcggacttgaccacattccagtccacgtcgaccagcgcgtctccggcgttcacctgctggccttcgctgaccatcatcgtgaacggggatccggcgagctgtacagtatccacgccgatgtgcacgagcacttccactccggcgggagtggtgatgcccactgcatgcttggcctgggcgaccgtggtaatcttgccggccaccggggcgaccacacgacccgacgtgggaaccacggcgaatccgtcgccaaggatcttggcggcgaaggtctcgtcgggcacttccgtgatcggcttgatggcaccgtccacaggggcgagcaccgcgttgtcagcggctttcaccttgggggcgggggcagcggcagcgggggctgccgtcacgcttttggggaaccaccaccgatgacgggcttgccgtacagggcggacagagcgtcagccacggcctgcacctgcgtgccgacgatgatctggacgttcttcttgtcgatcaccttgacaccggggacgccggtcttgcggatggcgtcgacgtcgaccttcgaggaatccacgacacccatgcgcagacgggtgatgcagttctcgatttcggtgatgttgtcgtgaccgcccagagcggcgtacagcttgccggcgaggtcggcgtacttgtcaccggtggacgaggtcgcggtgtcgaacgctgcggaggaggcatcgtcgttatcgtcatcgccacggcccggggtcttcatgttgaacttcttgatcatgaagtcgaacacgaagtagtagatgaccgcgaagacgaggccctgaacgataagcatccacggcatatgagctgcgggaaccttcagcgacaggaaccagtcgatgaagcctgcggagaagttgaagcctgcgatccactggaacgaagcggcgatgaacaccgagatggcggtgagcagcgcgtgcaccacgtacagcgggaaggcggcgaacatgaaggagaactccagcggctcggtgacaccggtgaggaacgcggcgagcgcaccggcgagcatcagggatccggtggccttcttgttctcgggcttggcgttcttgtagatcgcgagtgcaccggccggcaggccgaacatcatgatcgggaagaagccggcctggtagatgccggtgacgtacacgccgaacgggtggaagccgccggtggcgatgaccgcgccactggccgggtcggcgctgccccagaacttgccgatgtcattgatgttagcaaggttgaaccagaacacgttgttcagtgcgtggtgcagaccggtcgggataagcagacggttgaagaaggcgtaaatgccggcaccgacggcgccgaggcccatgatggactcgccgaaccagaccagcgcaccgtagacggccggccagatgaacagcaacagcagcgagatgatggacatgaccgcagcggtcagaatcggcacgcaacggcggccggagaagaacgccaggaagtccggcagttttgtcttgccgaacttgttgtatagcgcacctgccacgcagccgaccaggatgccgaagaacacgttcttgttgccgatggcgccagcggcgaatgccgggtgctcggtgtcgaccttggtggcgtcgaagccaaggaacatggacgcggagcccatgatcgtggtgacggtcaggaaaccgaccagtgcggacagtgccgaggcgccgtccttgtcgcgagccatgccgatggcgacaccaacggcgaacagcaggcccagattgtcgaggatcgcgccgccggtcttgcacaggtaggcggcgacgacgttactgccaccccaaccgctcgggtcgatccaataaccaatgcccaggaagagtgctgcagcaggcagacacgcaacgggcagcataagagcgcgaccaaggcgctggatatatgctttcattccaacctccctctgaggatacggacggcgctttcttccgccacaattcccgttcacgtaccatcccaccattggatcggacgctcgcgagtatgtcagcaacgccgcttcaatgaacaatggtacgtgacttttacgatatgaggcccgtgtttcgttaagattatttgctaaataggcaggaaacatggcgggtgtataagggctcagccttacgggaagctggtgtttcacgatttctctgtttacggcgttaatttgtaaatctactttactgcggcgtgtcgttagcgctgctacatagtggaaagccaagggaaacgaggccattgggagctggatccggcctccggggcgttgacgggcggcgtgtcggattcattccgtaggatggtacacagtgacgccggcccggcgaccctctatcggtgagtggcggccgggcgcgccaaacaccgctgaaggaaggaaatccgtggcacagctgaatgacaaccccatccgcgttggactgttgggagcgggaaccgtcggatcacagaccgcacgtctgctggtggagcagaaggacgaactcgctgcccgcatcgggcgtccgatcgagctggtcggcgtggcctgcctggatcccgatgaggtggacttcccctggatcgacaagtctctgctgacgaccgacacgatgaaggtcgccaccaacgccgacatcgtcgtcgagcttatcggcggcaccacagtggcccgcacgttcgtgatggccgcgatcgagtcgggagcctccgtggtcaccgccaacaaggcgctgcttgccaagtacggcccggaaatctacaccgcggccgaggccaagggcgtcgacatctacttcgaagcggccgttggtggcgccatcccgttcctgctgccgctgcgcgaatccctggcgggcgacaaggtgaccagcatgctgggcatcgtcaacggcaccaccaactacattctcgacgagatgaccaccaagggcctgcagttcgatgacgtgctcaaggacgcccaggccaagggatacgccgaagccgatccgaccggcgacatcgaaggctacgatgcggccaacaaggccgcgattatggccacgctcggcttccacaccaacgtgacgatcgatgacgtgagcgtcgagggcatcacgaagatcaccgccgacgacatcgccgcggccgccgccgagcacaaggtcatcaagctgctcgccgtcgtggagaacggcgaggccggtgtgtcggcgcgcgtctacccggcgctgattcccgaatcgcacccgctggcatccgtgcacggctcattcaacgccgtgttcgtcaaggccgaggcggccgacgacctcatgttctacggccgtggtgcgggcggcgctccgaccgcttccgccgtcgtcggcgacgtggtcaccgaagcccgccacatcgctcaaggctgcaccggcccgtccatccccatgtaccacgagctgcccaaggcgccgatcagcgccagccgcgccgcgttcgccgtgcggttcctcatccacgacaagccgggcgtgctcgccgccatcgccaaggagttcgccgaccacggcgtgtcgatcaacggcgtcaatcaggatctcaagccgacgatgaccgatcctggttatgacggcgagatccaacagctgcgcatcgtcacgcatctgaccgacgaggtcacactgcgtgagaccgtcgaagccgtccgcacgctggacttcgtcaccggagagccgtccatcctgcgcgtgctcgactagtcatacgattgcctgcccccgctgtcgggggctgtcggcaaagccgactgggggtggtttcgcggcgtttccgcgaaaccaccccgatctcaccatcgtttgctcccctccccgtcagcgggggcggaatcgctgaatcaaggaatcatggaaccaatctgtacacaggtcaaggtccgcgtgccggctacaagcgccaatctgggctccggcttcgacacggtcggcctcgccctcgattatcatgacgaactcaccttcacgctcagccgtgacccgtccaatcgcgccgcgcaagtgctgatctatggcgagggcgaggacacgctgccgcgcgacgagacccatctggtcgtctccacgttccgcaaggcatgccagaccttcggcctgggcaaggtcgggttcatcctcgaagcgcacaacaacatcccgcaggcgcgcggcatggggtcgtccgccgaagccatcgtggcgggcatcgccgccgctgccgcgttcgcgcaggaggaccggctcaaccgcgattccatcttcgagctggcggccgccatcgaaggccatcccgacaacgtggcgccggcggtgtacggcggcatgaccgtctcatggaacttcgacacggccgaaggggtcggctcggtgccgatccccggtggagacccgctgcacggcggtttccacacggtcaagtacacggtcgatccgggcgtcacggcggccgtgttcgtgcccgactacgaactgtccaccgagaaggcgcgcgaggcgctgcccggcgaggtcgcctatcgcgacgcggtgtttaacgtgtcgcgcgtggcgctgatggccgcggcgatgaacccgcgcgcgctcgcgtccggcgaagagccgaacgcgctgctgtacgctgtcacgcaggatcgcctgcaccagccgtatcgcaaggggctcatgcagccgtcatgggacctgattcaggcgttccgttcccgtggtttcgccgccatggtgtccggcgccggcccgtgcgtgctggtgctgcatcacggcgacgccgtggcggacatcgatgaggtcgcggcggaacagctggcttccggccattggaaggtgctgcacctgcccatcgacacggtcggcgtgcaggtcgagcgtaagtaggaataccgcacgtgcctcctcgcccgctcttcgggccggagatgaggggagcgcgaagttgccggttgggtgatgcggcagctggtgcggcggcaaaagaaaggtgacgatcatgtccattccgatgattctggcgtcgaagtcccagccgcgccgggacgtgctgtatgcggccggcatctgcccgaccatccgcgtgtcccatgtcgatgagccggctgcgctggaaaaggccgccgccgagcgcggcgtcaccgttgaccagctgaacgtcgaacagcgcgtgatgattttggccgaggccaaagcgcaggccgtgcatcaggcgtaccgcgatgtcgccgacgcggccgcgagcgcgacgggcgagcgcgtgatcgcgtacccgttgcaggccgcggagcttcgcggcgagatgaacgtcgcggacatacctcgccagagtggcgctccgcttgactattcgaaggcgccgatcgcgatgacctgtgacttctccggcgtggacatgccgaccgtcaccgaaccgatatccaatgtgattgccatgcagccggggctcactcgggcgagcggcggcccgctgatcgtcggctgtgattcgatgttcctgcttgacggcgaatgctacggcaaaccgcacagcgtcgaggtggcgcgtgagcgactgcaccgcatgagcggcgccaccggcgagctgtggaccgggcactgcgtgatcgacttcgcgtccggacgcgtcgagcgcggcgcgagtcatgccgtcgtgcggttcggcgagttcagcgaccgcgacatcgaacgatacatcgccaccggcgagccgctggaagtcgcgggatcgtttacgctggaaggttttggcggcgcgttcatcgatggcatcgacggcgacccgcacggcatcatcggcatcagtctgccgctgcttcgccgactcgtcggcaagctcggcgtggactggaccgacctgtggaacgtggcccgcggggaatcggcgcccgaagacaagaccggaggcggcggagtcgtgccgcccaaggagaacgtgcatcagcccggcgacggctggatcgactgcgcatgcgggcgcaagcactggggattgaacggtgcctccggcgtgctgctcgcgcggcgtgaccccaagagcggcgaagtgaccagcgtggtgatgcagcatcgcgccgcgtggagcgcggaaggcggcacatggggcattcccggcggcgcgacggccgacggtgaaagcccgatcgagggtgcgctgcgcgagagctacgaggaggcgaacatcacgcccgaagacatcgaggtggtcgggtcctaccgtgaggatcacgggccatgggcgtacaccacggtcttcgcgttcgagaagcccggtcaccgggtcgtgccacgggcgaacgatgacgagagcatggaaatcgaatgggtgccgatcgacgaagtgcccgaccgcaagctcttgaccgcgatgcgcacagactggccgcgcttcgccgagcgcctgcacgcgctggccgctgccgcacggtgttcgtgacggttactgcagttgcgccaaacgctggtagatgtcggatggaaggtggcggtttgcgaatcctttgacgcgaattcccgtgtcgaggggcatatacacgatgcgcgtgtcggcgcgcgactgttggcctcgtcgatgttggaagtggaaggaacgccacccgctgaaaccgtacttgaaagggcttccttccacgttgccctccacgagccgtgtcagggctcggtgaactctggccaccgccatcttgaattcgccttcgtcgggccagacatatgccagaagaatcacatcatccgcaagtgcatccggatccatatacagaccgcggacggacgagatgatggcaatggcttgctccaataatgcgtagtcggcggccatcagcgaccgccatcaaggaacgcgtgaatcttctccttgcgccgcttcaggctttcctgcgccgactgtgacagttcggagccggtctcccattgttccttatcgcctcgggcggtgaacatctgctgtatggtgaggcgttcgacctcggattccagcgcattgatgacatccagcatctcgttgagagagtccacggacaccagatagccggctgtgtcggcgcggtcgacgatttccagcaatccccgctgctccagcgcctttcgccatgcgttcgaacgggacaactcggtcaacccgatgcgagagcccggcgtggagatctctcgtaatgcctccgcacgttccttgatgtccgtgtaagtcaccaccttaatcgcaacaaaatatgcattatattacgcatagtactacatgatataatgcaatatatattcacgactgccgagccgtaccgcagacgagcgactgggggccttagtctcgcttcgcgacagaccttcgggccctgcaatcacggacgccctgtgggcgctcagggtggtgccaccactctcttcccctaatctttccggatgaggggagaaccggttcgccgcaaggctcataccgccgaccgatggccggtcgcgtgccgcctgcgtaatctcggaggcatgaacacagcaacatcgcaatctcagtcccgcgcccggtctcagtcgtggacaccggtgatcgaggcccgtgacctggtcatggactacaccgcaggcatggcccgtgtgcaggcggaccacagtgtcaccggcgtgatgccgcgaggcgccggaaccggcggcccccatccgtatgcggccggcggaaccggctacgccatgcccgccgtgcatacgctagcgctcaatcacgtgaacttcgacttggctcccggcgagacggtcgccgtgatgggaccgtccggttccggcaagtcgacgctgctgcacgcgctcgccggcatcatccgcccgacgtcgggcacggtgaccttccaaggcgcgaatctgaccgcgatgagcgacgcggaccggaccaaactgcgccgcggtgcgttcggcttcgtgttccaatccggacagctgttgcccgagttgccggcggtggagaacatcgcgttgccgatgatgctggacggcgccgactaccgttccgccaccgatgcggcgatgctgtggctggaacggctgggtttgcggcagctggcctcgcagcggcccggcgagatgagtggcgggcagatgcagcgcatcgccatcgcccgcgcgcttgccgtacagccggcggtcgtcttcgccgacgagccgaccggcgcgctcgaccaggccaccggccgcgaggtcatgagcattctcatggaagccgcgcgtgataatggcgctgccgtggtgatcgtcactcatgatcccaacgtcgccggcttctgcggccgcacgatgacgatgcaggacggccgcctcagccagacggccgacgccggctttgcccccgctggcggggttcggcatccgcaggctgactgggggcggcccgagagcgctgaaccaccctcagtctcgctgcacccggcagttcccgcaggaggcgcccaatgagcacgttcgcactatggcggctgttccaccgcccaggccggcgcggcggctccggccacacatcggcgttggccatcgtcgcgttcgcggcggcgacggccatcttcctgaccgtgctgggcggcgtgcacgggttcatctggcgcgcgtccgccgaccatacgctgaaatgcctgattgacaggtcgacctgtgcgccgggcacatgggcggtgtgggccggacggctcaaggaccagcacgactgggcgcaatacgccagcacgtacgtgatgctggcggccttcgcctgcatactgctgatcgtgccgttcgtggcgctcgccggctcggcggcacgattggcggcatcgcggcgggacgcgcgattggcggcactgcgcctcgcgggcgccaccaccagtcaggtgaccagactgaccgcgttggatgccgccggacaggcgctcatcggcgcgttgatcggcatcgtcggctatttcgcgatcatgccgctgatcatgctgctgaatttccaggatcagaggttcacgttcgagcagttgtgggtaggatccctgtcgctgatcgtcgtgctggtggtggtcacggtcctggcgctgatctccgcattgctgacgctgcgtcgggtcgccatcaccccgctgggcgtcaccgctcggaccgcccagccgctgcccacgaagtggcgcgtaatcgtgttcctggtcgtgctggtggccgcgatcgtgctgttcaagaacccgcagggcctgctgcattacagtgaggtgacgatgtatgcggtgattatcgggttcatcgcgctgtgcttcgctctagtgaacctgatcggctcatgggtggtgaccgcacgggcgaggttgcggtcccgccgccctaaggacgccgccacgatgatcgcgatgcggcgcatcctcgacaatcccaagcgggcatggcgcaatgtgtcgggcatcgcgctggcggtgttcatcgctggcatcacctcgatctgcgggttcatcggcgcatcgtcgaccgcgcctgtcgaaggcgtacccgaaccgggactggccttcatccgcgacatcggcaccggagggttgctgacgctcggattcgcggccgtgctggcggccgtcagctccggagtgatgcaggcgggcagcgtctacgaccaggtttccgaataccgcatgctggtgttggaggggacggacgtgaaaacgttgaaccgtgcgcgtttcatcgaggtgctgaccccgctcaacacggtggtggccgttgccggcggctgctcgatgctgctgatgttcccgctgttcgccgcatccatgaccaaacccgccacgctgctcagcttcttcggcggcatagcgttgtgttatgcgctggtctccgtcggcgcattcgcctcgaaccgtgtcgccgccagcctgaatctcaccgactggcgtgccgacgactgatcgcacgctctcaaaactcgcagatagggggcctttctcgttaaaaggccccctatctgcgagttttgagagcgtcaactcagcagagcggcgataaccgcgatgaatatggggcttgtcatcgtgctcatcaggatgccgtcgcgtgcgaacgtaagtccaacgttgtaccgggcggcgtaattgtagacgttctggccggtcggcagcgccgccagcaccacgcaggcgtacagcgtcgcgccgcggaatcccatgacgaaataggagagcaggaaggcgatgatcggcatcacgatgttcttcagtacggctacggtgaagatcgccgggcggtcgcccttctgctgcagcggcttggtgccgtgcagcgacatgccgaacgccatcaggatcatcggaaccgcggagtccccgatcatgtcaatcgggtcgaagatgaagttcggcacggggaaccagccgatcttcgcgtcgatcgccgaaaccaggatgccgcccagggagccgatcagcagcggctgatgcagcggctgcttcaggatttccttgaccgataccttgcccttggtggtcacgtcgagcaccgtcaggccgaccggcgtgaagatcgcctgctgcatgaccaggatcggtgccaccagggctccgttgccgaggatgtacgtggctatgggcaggccgatgttgttcgagttcagatacagtgagttcagcgcgccgacggtcgcgtccgccggccccaagtggaagaacagcttgttcagcaccaggaacagcgcgccgacgagtacagcggagaagaacgccacgatgatcgacgaatggaagatctcgaagatcggctctttcgacagaattgcgaacatcagacacgggctggacacgaagaagctgaaacggttgagcaccatctgggcgctcggcccgcctatgcgcattcgagcggccacgtatccgactcctattacgatgccgatgacgcagaagccttccatcgcgtttaatagacccggcatattcccatcccttttccgtttgctggcaaaccccatactgccatacgcatgtgtttcgcgaggttctgtctcataacgtaggcgaaacccgtctcgcgagccacggtagcacggcatgctgcgcgtcgcgcgcttgttctcgccgccgacggggagttcgaccgtctcattccggcccggcagcgggctccgacgggacgtgctgccgttaggatggtcagtatgactacgacaacgacgatggcagcggccggcgctgacccgcgctcggcgatcgcgccgatcacctgcgacacgaccggcacgcgcgagaaggcgctcgcctcactgctcgaacagatcatggactcgtattccgtcagcgatgacgagaagccgctggccgacgccgtagaggcgttcctgcggtcgaagccgcacctgacggtgcacaggcacggcgacacggtggtcgcgtccacgtcgctcggcaggcctcggcgcgtggtgctcgccgggcaccttgacacggttccggtgatcgacaacttcccgccgcgctggctggcgcccggcgacccactgatccgggaggacgtcgccgcggcgcaccccggcgagcgggtgatgtggggccgcggcgcgaccgacatgaaggcatccgacgcggtgttcctgtacctcgccgccacgctggtcgacccgcaatatgacctgacgtacgtgttctacgaccatgaggaggttgcggccgagaagaacggtctgcggaaggtggccgaggcgcatcccgattggctcgccggcgatttcgcgctcatcggcgagccgaccgactgcggcatcgagggcggctgcaacggcactatgcggttcgacgtggtcacgcacggggtcgcggcgcattcggccagggcatggatgggggagaacgccattcacaaggccgccgatgtcctgaaccgcctgaactcctacgagccgcgaaccatcacggtggatgggctagattatcgcgaggggctgaacgcgacgctgatttccggcggcaaggggacgaatgtcatccccgacgaatgccgtgtccatgtgaactaccggttcgcgcccgacaagacgctgccgcaggcgaagacactgatgatgggcgcggatgccggcgcggagctcggcaatggcgagcatgtcgccaccggtggcgtgttcgagggcttcggcatcgagatgaaggacgagtcgccgtccgcccggccgggcatggacgcgccgatggtggtgtcgttggcgaagctggtgcgtgagcgtacgggacgggaaccgctggcgaagctcgggtggaccgatgtcgcgcggttctcgctgctgggtgtgcccgcggtgaacctgggtgcggggagcccgctgcttgcgcacaagcatgacgagcagatcgccgaaagcgagttggcgaccatggccggcatcctggaggactggctcaccggccgcgcgtgagcggggttcgggcgcgcgtgtcggcatccgtgccatcgaatagtgtgcggacggctgcccgcacaacgctgtccgttggcgctgtaggttttgtcgacgatgtcgtcgccgtccgcatcggtgacgatgatacggatcctgacaccgttcgcggagcgaaagcgtctgcgtacaagcataggctgggcgttgtcgccacgccaaaagaacgttgaatatggtgagatggtcatggccggtcaaattgtgtgccatacttaaagatggtggttctgcaaaccacctgagcgtgaaaggcgtcgatcccctcgcatgcatgaagatgcgcgagcgctggtgtccgccgaagcacgcacacggacttttaacggatttgcttcctgcgggcgcaagcgtagcgcggccacggtgagagcgtggtgtgagaccgcatgaggccatgagtgtgcgacgtggtgcagcacgtcgtgaggagtatcgtgcctagtgtgaacgataacggtttcagtcgtgacgaaaccgaagaacagcagcctacccacgccgatgcggcccagtcgcctgattcggccgataaaacgcctgcggcgccgcgtcgtcgtcgcggtggccgccgcgtggttcgtggcgccggtgccgccggtgccgcggtcgcgctgaaggtcgaggaccattccgctccgctgttcgcggaacccgtggtggagcagccccttacccgtcgtcgccgctcgaaggcggccgacgaatcgccggagaccaacgagccggagaccgccgcatcggccgattccgaaaagaaggatgatgcgcggcacaccaaggccgacggcaagtctcggtccgcgtcgcgctcctcgaaagcgacgaagcgccatgacgatgacgccgatcaggccgaaccccggcgcacccgcgtgcgtcgtcgcaccgccatgttctcctcgcgcgaggacgcttcgccggccgttccgggcgagccgtcggatgacgacctcggcgtcgataccggcaccgatatcatcgtccgcgatgattccgccgatctgtcccgcgccctggatgtcgttagcacgctgccgcaacctgcgccgcgcgctcacgcgatgacgtccgtgctgttccaggagccggtgctgcccgtgccggaaatcgtgcgcgacgcgcgcgatgacgaccgcgaggatgacgaccgcgacagccgcggcggtggcaagtcccgtcgctcgcgcaatggtcgtgtgtcacgtgacggcgcgcagggggacaaggacaagagcgcttcctcccgtcgcgatatcgacggtctgagccacatcgagcgcgtcgacagcttcgataccgacgacagccgcagccgtgacgaatccggcgaggccgacgagccggtgcgttcgtcgcgccgcaaccgtcgcctgaacgcgcaggagcgccgtgcggccgccgaagtggagcagatcgaggaggacctggagctcgacagcatctcctatacgccggtcgacgacgaggagccctccgaggattcgggcacgagatcccgtcgccgtcgccgctcccgtcagaaccgtgccgacgacagccgcggcaacggcgagtcagacagcagccagtccgcggcgcagcaggacgagccagccaagccgtcatcccgccgcacacgcgacgaggaagaagacgatgactccaacgtcacccgtcgccgtcgccgtcgccgctcccgcgcgtccgacgagcagggtgacgatgagatgaccgtgcgccgctcgcgcaagcagcagtacatcgacgagatcaccgacgtcgagggctccacccgactggaggcgaagaagcagcgccgccgcgacaaccgccgcgagcgcagccgccagagccagctggtcgagcaggacttcctcgcgcgccgcgagcacgtgaaccgtctcatggtggtgcgcgaacgcggccatcacacgcagatctccgtcatcgaggacaacgtgctcgtcgagcattacgtctccgacatccaggaggtcgccacggtcggcaacatctacctcggccgtgtgcagaacgtgctgccgagcatggaggcggcgttcgtcgacatcggccagtcccgcaacggcgtgctgtatgccggtgaggtgaactgggacgcgacccgcctcgaagggcagccgcgccgcatcgagctggcgttcaaatctggcgatccggtgctcgtgcaggtcaccaaggatccgatcggccacaagggcgctcgcctgacttcgcaggtcacgctcgccgggcgttttctggtgctcgtgccgtccggcggcatgaccggcgtgagccgcaagctgagcgagcgcgagcgttcgcgcctcaagggcattgtctcgaagatcgcgccgaaggacatgggcgtgattatccgcaccgcggccgaaggtgccaaggaggaggcgatcgtcaaggatctggagagcctggtccgccagtgggagcgcatcaacgccaagcgcgaggagttctggcacggcaagcggccgaagctgctgcagggcgagccggacgtcgcgatccgcgtggtgcgcgacatcttcaacgacaatttcggcgagctgatcgtcgagggcgacaaggtgtacgagcgcatcgaggaatacctcgacacgatggcacccgatctcaaggagaagttgtccaagtgggatccgtccgagcatcagggcaaggacgtgttcgacaagtggcagatcgacgcgcagctcaggaagggcatggagcgtcaggtgtacctgccttccggcgggtcgatcgtcatcgaccgcaccgaggccatgaccacgatcgacgtgaacaccggccggttcatcggccgcggcaagagccttgaggagacggtgacgcgatgcaacctggaggcggccgaggagatcgcgcgccagctgcgtctgcgcgatatcggcggcatggtcatgatcgatttcgtcgacatggtgatgcccgccaaccgcgatctggtgctgcggcgtctggtcgaatgcctggcgcgtgaccgcaccaagcatcaggtggcggaggtcacgtcgctgggtctggtgcagatgacgcgcaagcgcatcggccagggcctggtcgaagcgttctccgaggagtgcccgacctgccatggccgcgggttcatcttgcatgacgagccgaccgtcagcgcggattacgacgatccgtatgcgctcaagggcggcgatccgttcatcaagaccaacaagcacggccgcggtacggatgtgcaggtgccgcagggctcctcgccggatatcaaggccaagctcgcgcagatcgccgccgcggcggtcgccgcgaacggcaccgacgaggatgagtgacccgacgcgctgaatgaatcatgatttccggtgtgtcaacctgacacgccggaaatatgatttgcgttagtacatgggtcagtgtagattagattgctggtgtctgaccagcggcttgcgtgcgtcaggcaagtagcttttataacaccatagcaaggaacgaagcatgtacgcgattgtgaaggccggtggccatcaggaaaaggtcgaggtcggtgacgtgattctcgtcaaccgtcttgaggcgaagaaaggcgagaccgttgaattcccggtcgcgctggttgtggatggtgccaaggtgacgctgggcgccaaggatctcgccgcggtgtccgccaagggtgaagtcattgacgacgaggccaagggccccaagatcaacatcatgaagtacaagaacaagaccggcgtgactcgtcgcaagggtcaccgtcagaagctgaccgccgtgaagatcacggcgatcgcctgagccaatacaggaaggatctgaatcatggcacataagaagggtgcttccagctcgcgcaacggtcgcgattcgaagcctcagtacctcggcgtcaagaagttcggcggcgaagccgtcgtcgccggcaacatcatcattcgtcagcgtggcaccaacttccaccctggccagaacgtcggcatgggcaaggatcacaccctgttcgcgctgaccgacggcagcgtgaagttcggcgtccgtcacgaccgcaaggtcgtcgacgtcatcgccgcctgagcgataccgcattaagcgtcaagccgcatcccacctgggtgcggctttttcgtttgccgccctagcgcattcccggcacgcccgcaccgcacggcgcatccccacagagccgtcacgcctgtgccatgcgatgtcacgcctccctcatcaggcaccacatcactctccgaggagccaccccaacctcctctggtacaccggtacattacgggttgaaatagccgattccggcaattccccgtgtgaaatcgccgttttcaggcctcaaaacgaccatttggcacgggtaattccggataacggctatttcaacccgtgttttggcgcatggcggcgcttatcggggcttggaatggtgtcgctgcgatcacggtcggcctttccgggcttatgcctgctggcccacatgtgtgggttacgagtgcggcgcgcggcccgacatcacgcgtgtcatggttgtatgcccatatctctgagctgccggacgattcgtcccggattgtcaagatccctgtagtacatgcgcaccatgccgatcgcatactgcgacatgcattgctggcgtttccgttcctcatccactacttcgcgaatttcccggcctgaagtcatatgcggatccacatacttgcgaacgccatcgaattccccgacgattaccgagccgtcttcacgcttccagagaaaatcactgcgatgcttacgaccgggatgatcgagacaggggaattccacctgaatatcgtcaggagggcagccggcatcatgcaacatgccgcgggcctcggattcgccgccgttctcggcacgccgatctgcaagcgcgaacgcgcgctcgacggcggcgcggttgcgtgagtatttcacgctggagggatacgcccggagcacggattcgctcacgaggccgttgcggagcgcacaatccgctggcccgagggcgtagcgcagaggctggcatgccgcgaggtcgaacagtgtttgcagcaagctgatgaccttcactccctgaaccacggtgatgtccggatgcgtgatcgcgtgatgcgatatgtgcctggtgtcctgatgatgcgcgccggggctcgcgacgatgcagattgggaatgccagccgataggagcagtcgagcccgtgcatgatggcggccgtaggaccgcagaacacccaatcaggatgttggatggcgagcgctcgtacgatatggcgaacctgttcatgcggatcaagcgattcccaatacgtgggctctgcgtacaggccgcggaagactctcagcacggcgccggtcttcactctcctgcgtattgcctgtatgtccgtgttggtggagggaatggcgcagcgtcgctcctgccgtgcaacggcgaaaagtctgtccagcgaatgatgcgtccccatatgccaagtgtagggggtctgggctcgcgacatctgcgaattcgcgatgagcctattccgacgggaaatccggatgatggcggagcatacggtggtgtgcaaggcatccattcgattgcgcataggcggcgacggcccacattcgcgcgtcatgtgccgtgccctctcatcatgtatcgcgcctccctcatcaggcaccacatcactctccgaggagccaccccaccctcctctggtacaccggtacattacggggtgaaatagccgttatccggaattccccgtgccaaatggtcgttttggggcctgaaaacggcgatttcacacggggaattgccggaatcggctatttcaacccgtaatttgagcacttgtgaagacctccgcacggattgggggggggcagagcgaccggggctgctccgctgcgggcggagcgagcgaacctggggagaaccgggggtcaaggtaaggtagagcgttatgagtgattttgtggatagagtgaccgttcatgtcaagggcggcgacggcggcaatggatccgccggcatcaggcgcgagaagtacaagccgttggcaggcccgaacggcggcaacggcggcaacggtggttccgtggtgttcgtggccgacacgaacgccaccagcctgctggactaccggttcatgccgcatcgcaacgccggcgacggcacgatgggtctgggcgacgtcaaggacggctccaagggcgccgacctgatcctgccggtgccgctcggcactgtgatcttcgccgcggtcggcgctcaaggccgtcccaagcgtccgggcgagcagctggctgatctgcgccataacggcgacaagttcgtcgcggctgcgggcggcgcgggcggtctgggcaacgcggcgctggccaacaagacccgccgcgctccgggtttcgctctgctgggcgaaccgggcgaggaacgtgatgtgatcctggagctcaaatccatcgccgatgtagcgctggtgggcttcccgtcggccggcaagtcgagcctgatcgccgcgatgagcgccgccaagccgaagatcgccgactacccgttcaccacgctggtgcctaacctgggtgtcgtcgtcgcaggcgaccaccgctataccatcgccgacgtgcccggcctgattcccggcgcatcgcagggcaagggtctgggattggagttcctgcgccacatcgagcgcacggagatcatcgcccacgtcatcgactgcgcgacgctggagcctggccgcgacccggtttccgactaccatgcgctggagcatgagctcgccgaatacgccgacaagctggaactgccgctgggcgccatcccgattccggaacgcccgcgcatcatcgtgctcaacaaggtggatgtgccggaggccaaggagctcgccgatttcgtgcgcccggacttcgaacgtatgggattgaaggtgttcgagatctccacggcttctcatgaggggctgaaggagctgaactttgcgctggcggccatggtcgccgacatgcggcaggaggtcgccagccgcgagcaggccgaggaggaggcgcgcgtcgtcatcaatccgttggagaaccggtcgaatcgtcgccgtgcggctgcgaacggcactgccgatttcgccgtggcccgcaaggagggcgatggcggtttctggtacgaggtgaccggcgcgaagcccgaacgttgggtggtgcagaccaatttcgacaatgacgaggccgtcggctatctggccgaccgactcgccaagcttggcgtcgaggacgagctgcgccggctgggagcgaagccgggtgacgaggtgcgtatcggcaaggggcagcgtgccgtgtcgtttgattgggatccgaccatcgccgccggcgcggagatgcttgacggcgctcagctgggtgcccgcggccgcgatctgcgtcttgaggatcaggagccgggcggccgtcgccgtaccaatgcggagcgtcgtcgtcagtaccacgagatgatggacgccaaggccgcggtgcgcgaggccatgatggccgaacgtcaggccggtcactgggccgatccgagcgtcgacgacgaccgtcacgacgagcagagcctgttcggtcgcggcgaggacggcgacgagaatgacggcggtctggcctgacacctgcccccccccagtcagcttcgctgccagctccgccagcggggggggctggcgcggagcgactgaggatggctggcacattcgtctgcggttccaccagcgcggcggccgcagcgtggaacggcggcgtcctatgacaccggcgtctgcgatgattcaagatatacgtgatcgggaagggagtgcgtgttgtccgtcactgaatcggatgtgcgccgcgccatcgcaggcgcacggaccatggtcgtcaaagtcggttcgagctcgttgacgcagccgtccgggcatctggatgtcaagaagctgaactccctggtggccgcgctgtccgccgcctcggcgcagggcgcccgcgtggtgctggtgtcgtcgggcgccatcgccgcgggtttcggcccgctcggcttcgagagccgtccgagtgacgtggcgacgcagcaggccgtcgccgcggtcggccaggggctgctgatggcgcagtatgaggccgcgttcggtcgtttcggcgttcgggtcggccagattctgatcactgccgaagacacgatccgcgcggtccagtaccgcaacgtgcagcgcacgctgaaccgtctgctggaactcggcgtggtgccgatcgtcaacgagaacgattcgctggcgagcaacgagatccgtttcggcgacaacgaccggctttcggcactggtggcaaacctcgtccgggccgatgcgctggtgttgctcacggatgtggacggcctgtatacagctccgccgagcacgccgggcgcccgccgcatcggctttgtgccgaatgtgatcgacacgatcggcgacgtgcaagtcgccggttcgtcgtccggggtcggcacgggcggcatggtcaccaaactggatgccgcccgcgtggcggccgcgtcgggcattcccgccgtgctgacgagcgcgacgaacaccggcccggcgctgatgggcgatccggtcggcacggtgttcgcgccggtgaagcaccgcggttcatcgcgtcggctgtggatcggcttcgcgtccgacccgcgtggagccttggtggcggatgccggtgcggccaaggcggttcgaggcgggcgcgcgagtctgctcgccgccggcgtcgtggaggttcacggcgaattctccgccggagacccggtgtggattgatgacgaggcgggcgcgcatctggctcgcgggctcgcgggcttcgactccgaggagatcccgcagatgctcggccgcaacaccgcgcagctcaggcggttcctgggcgacgagttcgctcaccccgtggtgcaccgcgacaatctcgtgctggtctgattcgtcgcgcaacgagagccgccgtgccgagcgtagtcggggtctgttgttttttcgtgctctgggtttagcatggatggcatgactatggctgactggcagactttttccgaccgtatcaacaatgtggcaccgagcgcgactcttgccgtcgattctaaggcgaaggcgatgaaggccgccggcgtcgacgtgattggcttcggcgcgggagaacccgatttcccgactcccgcggatgtcgtggatgccgccgtcaaggcgtgcaacgacccgcgcaactacaagtacacgcccaccgccggcttgcccgagctgcgcgaggcgattgcggccaaggtgctgcgtgactccggctacgaggtgaccgccgatcaggtcgtggtgaccaacggcggcaagcaggccgtgtacgaatccttccaggtgctgctcaatgacggcgacgaggtcatcattcccacgccgttctggacgagctatccggaggccgtcaagctggccggcggcaaaccggtcgaggtgttcgctggcgccgaccgtggtttcgagcccgacatcgccgccatcgaggccgcccggaccgagcgcacgaaggccatcatcatcacctccccgaacaacccgaccggtgccgtgtggagtcgcgaggcgatccgcgcgatcggcgagtgggccgtggagcaccacgtgtgggtcatctccgacgagatctacgagcacctcaactatgacggcgccaagaccgcatacgtcggcgtcgaggtccccgaatgccgcgaccagctgctggtgctcaacggcgtcgccaagacctacgcgatgcctggctggcgagttggctggatggtcgcccccgcgcccgtcgccaaggccgtcgccaagctgcagggccatttgagctccaacgtttccaacgttccgcagcgagcggcgctcgccgccgtcgcgggttcgctcgacgaggtgcatatgatgcgcgaggcattcgacgcccgccgcaaggccattgtcgccgccctgaacgatatccccggcgtccactgcccgacgcccaccggtgcgttctatgcgttccccgatgtgaccggcctgctgggcaagccgctcggcgagaacggcaccgtcgtgaacacgtcttccgaactcgccgcggcgctgctggacgaggcccatgtcgccgcggttccgggcgaggcgttcggcgcccccggatacctgcgtttctcgtatgcgctggccgatgaccagctcgctgagggcatgcgccggttccgccgctgggtcggctgaaaccgttgcaagaggtcgtgcgcggtatctgccgcgcacgccgcggcacgccgattacgcgccggtcgagacacgcgattggacgaaatcggcaatccccgctaatatggcctcttggcggttttgccaagtaacggacacgtagtcttgcgtgccgggtacagtgggcaaagttcacctagggaagtggcgcaattggtagcgcaacggtctccaaaaccgtaggttgtgggttcgagtcccgccttccctgccaagtatttgcaaccaacacacaaaaggatgaacatggcgaaggcaagcaatgcggagaaagcggtcaagccgaatgtattcatgcgcatcggcctgttcatcaagcagattatcgatgagcttcgcaaggtggtcacccccactgcgaaggaactgttcttctggtctcttggcgtgttcatctttgtcgtgttgctgatgctcctcgtcacgggcatggatttcggtctgggcaagctcgtgctgtgggtgttcggctgatccatcgaccctgaaggtgaaagttacgcatgactgatgaagtgaatctcgataacctcgacgcactggcggatcttcccgattcggccgacacggccgttgaagccgatccggttgcggacgcggcggttgattccatcaatgacaatgccgaagaacagcccgccgcggctgatgacgccgttgaatccgacaccgccgaaaacgatgcggaagcgtccggcgacgccgacgagcaggaatccgaagaactcgatgcgggcgcaaaggccgttgaggagttctcaaagtcgctgcgcaccctggaaggcaagtggtatgtgctccacacctattccggttacgagaagcgcgtgaagacgaacgtcgaatcccgtgtcactagctttggcctggaagacaagatcttccagatcgaagtgccgatggaggaagtcgacaagcacactgacaagggcaagaaggtcatcacccgcgtccgcattcccggctacgtgctcatccgcatgtggcccgacgaggatgcccgtcgtatcgtgcgcgagaccgaaggcgtgaccggctttgtcggcccgaccaaggatccggcgccgctgtcccgcaaggaagtcgtcgccatgctggcgccgatgatcgcctccgaagcgctcaagaaggccggcgataagcctgccgcggccaagaagcgcgttgtcgaggtgtcctacgccgtcggcgatcaggtcaccgtcatcgacgggccgttcgccacgatggccgccgtcgtctccgatgtcgaacccaccacacagaagctcaccgtgctggtttccatcttcgggcgcgacacgccggtggaactcggcttccatcaggtggagaagcttcagtaagtcgtcagacgttgtttgcatgaacggcggtcggttttccggccgccgttttgcgttgccggcaccatttgtgccacgacatgccacgcacgtacaatggctctcatggcatccaaaggaaaaccgtcaccgcgttccgcggtcaagccgctgtccaatgcacaagtgagcaggctcgccaaggcgcacacgctcgtcgatccgatgcacgacctgccgaccggcccggatcgcacgatcaacgaggccgaaatcgccgcgcagaaccccaagggcacctcacggctgctcaagggcgtcgatgtcgtgttccgcgcaagctgcaggacgtacgcctgggggctcgacaacatccctgaaaccggcccgttcatcaccgcggccacgcatgtgaccatgttcgacgtgttcgtgccgatggcgtcgctgttccacatgggccgtcgcccgcgctacatggcgaaggccgagatggcgcactggcctctgatcggcaagtggttccagattgtaggcatgcagccggttcagcgccggtccggcaaggcacgagccatcgaggagacctcggtcgagattctgacgagcggccgcccgctgaccgtctggccggagggcacggtgacccgcgacccgaagaaatggccgatgagcatgaagaacggcgtcggcgtgatcgcactggaggcatcgcgccgactcggataccaggtgccgctgttctgtgcggtgacgtggggtgcggcgagcatcaaccactggtggccgtggccgcgcaagaacgtcgtcatgtgctacgacgcgcagctggattacgctgatttgctggtcgacagcgagtcgtggggcgatgagccgcccgtggagctcgccgacgagctgacccgccgggtacgtgtgcgcatgacgcaggtcatggcggagatccgcggcgagcgtgctccctccggctactgggattaccgtacgatgagccgcgttaccgattgattcccgaacacgacggacatccgagacgcccgcgcagcgccatgccgcgcgggcgcgttcatacctgcgcgacgtgcgcatggaggtctcgtatccggggctggagtagggtagtgggttatgaaatgtactgtattgggtgccggcgcatggggcaccacttttggtcaggtgatggcagacgcgggcaatgacgtgacgatgtgggccatcgagcccgaaatcgtggagggcatccgcgaccggcaccacaatgccgttcgtctgccgtccgtcgccaagctgcccgacaacatgaccgccacgggcgaccgggcgcaggccgtcaaggacgccgatatcatcgtcgtcgccatcgccgcccagttcgcgcgcgtggcgctcgccgagttcaaggacctgattcccgataccgccgtcgtcgtcagcctgatgaagggcatcgagcggaacaccaagaagcgcatggatgaagtggtccgcgaggccctcgacctgccggctgagcgtttcgccgcggtttccggaccgaacctgagcaaagagatcgccgaccgtcagccggccgccacggtcgtcgcctgcgagaatctggacaatgcgcgcaaggtggcgtccgcctgcacgaccagttacttcaaggcgttcatcacttccgacgtgatcggactggagatgtgcgggtcgttgaagaacgtcgtcgcgctcgcagtcggcatggcccgtggagccggatacggcgagaacaccgccgcgatgatcgagacgcgtggactggcggagctgaccgcgctcggcaaggccgcaggtgccgatccgaagacgttcgccggtctcgccggcgtgggcgatctgaccgccacctgcggctcgcccctgagccgcaattacacgttcggcgcgaatctgggcaagggcctgagcgtcgaggaggccacgaaggtgagcaacggcgtcgccgagggcgtgccgaccaccgacgccgtggtcgcgctcggcgacgagctcgacgtgccgactccgctcgcctacgcgatgagccgcgtgctgaacgaaggcatatcctgccagcagatgctctccgaactactcggcaccgagatcaccgaggagtaggctgcattaacccccccccagtctcgctgcgctcgacagcccccgccagcggaggcgttagcatatgccccgcagcgagacggggtggttcgcgccatcggcaaagctaatctcaccggtgcccaccctgctgagtttggcgggttttgcaagaggcgaattgttacggggcggtgcgccatcgcacgtattaggctatgacccagtatgtgcaaaacatggcatgggaggaagacatggctgaaacggccaagattcgcgttgtggtgatgtatggcggcaaggccgacgagcattcgatttcctgcatttcgactgccggcgtgctgcgcgcgcttgacaccgaccggttcgagccggtgccggtgggcatcaccaagcagggccagtggatcgtggacggcgaggacccgcgcggatgggatatggccgacggtctgccggtcgtcgagaagactcccggctcgcgcgacgtcgtgctggacgtggcgctcgggcaggatggcttcttcgcccgcaatgacgacggcacgctgagctcgctggggcacgtggacgcggtgctgccggttctgcacggcccgtatggcgaggacggcacgattcagggtctgctggagatgatggatgtgccgtacgtcggttgcggcgtgctcgcgtccgccgcgtgcatggacaagcattacacgaaggtgctgctggccgccgccggcattccggtcgctcccggcatcaccgtggacgcgcgcggcttcgacgcggtgtcgcggttcgccgctgatgccgatggtctgctcgctcgggtcgaggaggccggactggcgtacccgctgttcgtcaagccgtcccgcgccggatcgagcttcggcgtgaccaaggtggagcatgccggtgacgccgccgagctggccgccgccgtgttcgaggcgagccatcatgattggcgaatcctgatcgagcagggcatcgacgcgcgtgagatcgagtgcgcggtgctgtgcccgaaggccggcagcgagccgcaggccagctggccgggcgagatcgtgctcgacaagcgcaacagcggcgacgaccagttctacgacttcgacagcaagtacatggattcgtcggcgagccatgtggaggtgccggcgaatctgcctcaggagactctgcagcaggtgcgcgagaccgcggtcaaggcgttcaaggcggtggatggcgccggcctgagccgcgtggacacgttcgtgacgccggacggcgaggtgatggtcaatgagatcaacacgatgcccggtttcacgccgatctccatgtatccgaaggcatgggaggcgaccggcatcggctataccgacctgatcaccaagctgatcgacggcgtgctgcgatagaaaccgacggcacggttaggagaaacactatgggaaaacatgttggcggcaagctggtgcttgccggagccgtagccgcgggcgccgcggtctgggccatcaagccgcgttcgttcagcgacaagcagcgtcatttcgtgccgtcggttccggacgtatggtatgcgcatcgtggcctgcatgacgcgggatcgggactgacgccggagtatgcggcgcacagcggcgagtatgtggcgctggcgcgtcgctgcgcattgcgcgcgggatacgggacagctgacttcagcggctctatcgccccggagaattcgctggctgcgttcgccgccgcctgtgaggccggattcggcatcgaattggacgtgcagctcaccaaggacggccgcgtggtggtcgtgcatgacgataacctgttgcgcgtggccggagatccgcgcaagatcgccgacctgacgtatgaggagctgtcgcgcatcccgctgttccctgcgcccgcgaagccgggggatgccgaggcggcgcccgtcgccgacccggtggccgccgcacagttcgctccgcagggctactaccagcacgtgccgctgttcgtcgacgtgctgcgcgtgatcgcgggacgtgtaccggtgatcgtggagtacaagttcaccgacaacgccgcgtggggcgagcgggcggacgagctgatggagaagggcgaccaactgctgcaggcgtatgacggcccgtatgtgatcgagtcgttccatccgggcgcggtcaactggtacaaggagcaccgtccgggggtgtgccgcggccagttggcagagccggcgtcgctcaccggtaccggggccaaggagtggctggccgggctgttggcgttcgattggatctcccgtccggacttcgtggcgttcgactggcatggcggcccctctccgcagctgcgggccgcacgctggatgggcgcgataccggtgtcgtggacggttcgcagcgcggacgaactcgccgaatgcgaccagtatttcgaccgccacatcttcgagtcgttcgttccggatagcaaatagtccttttatatagtgcgtgcccccgtcgcgaagcgactgggggcattagcgtccgtaagtgcgcgccgaaacgacaagtgcgcgcacttacggacgcaaacagacccatttgcgtccgtaagtgcgcaggatcgtcgtttcggcgcgaacatatgaacgcaaatcacctccagtgagcatcgcatcggccagttggctcttccagcgctccaataagtaaggtaagttaacaaatagcggaaaacttccgcgagacagtgttgtcgcgacggggaaaaatcactgttctttgaggggatttgcacaggttttttcacgcatacccattggtatatggcgaaaatttctattttccttggaaattaataatgttaacaacacacgttcttgtattttgttaagagtgttatcatagaaaactgagacgcgcgtgtcgggcttccgtcatgcgtatccgctcaaggttaaaccttagtgctccatgatgaaggtaaggaaatatgagaaaacgagtggtttcagtggcccttgcggttgcactcgctgtcgccccactgggggtgggcagcacagcgtccgccgcgccgctttctgcaagtgatttgcagactctcgcgctccgttcagcggctagctccaatgacgcgaacgccaacgatgtcgccaccgtcgcggacgatgctgccgtgaacggctggacgattgaccgcaacaccgccaaaggcggcgaaattcttgcagccggcactggcgattatgcgggatggactcatttcaagtccacctccgccaacggcaatgccaccagcagcagtggctatccggctgtcgccattagcggcaagacgattgacctgactcgggctggagagttctccatcaaggtcaagtccccgcaggctggttccgcgaaccgttttggcttctacctcggctacaaggatccgggcaacgccctgttcctgggctatgacaaggggggctggttctggcagaagtatgtcggcggcaatggcgattggtacaacggcacacgtgtcgctgcccctgccgcgaacgctgaaatcaccgtcaacgtctcctggactgccgccaaggttgccacgctgactattgacggacagaaggcgttcgatgtggattactcctcgatgaccgcgctgaccaacaagctcgccatgaaggccggctcttactccggcaccagcgaagtcactgatgtctacttcaaaaacttcaccgtgggtgaagtcgccaagcacaacgtgaccggcaaggtcgtcgacgccagcggcgccgccatcgccggcgccgaagtcgtcaccggcaagaactccgccaccaccgcggcggacggcaccttcaccctcaccggcctcgccgccggcgactacacgctgaccgtgtccgccgaaggctacgatgacgccaccaagaccgtcaccgtcgctgatggcaatgcctcagtcggcaacatcacgctgaacaagtcggccgaagtcgccactgagacgctctccaccgccgccatggacgtgcgcgtgaagaagaacttcccgtccgtgtacgactacacgatgaagaagttcggcggcaagatcatgtacggccagccgaaggacgtgcgcgtcatcaccatcaacggcaccgacgtgacgctgaaggactccgacgtgaccttcaagaaggtcagcgcgaccgaggcccagtacacgctgaacgtcaagagcggcaacaagatcaacgcggtcgtcaccgtgcagatcaaggtcgtcgacaatacgctcaagctcaacgtcaccaagatcgtgaacaaggcggatgacgccaagaccgaggccgaggagaacccggtccagacgattgcgttcccgaaccagagcctcatctccgtgcgctccggtcaggacggcgcccagttcaccggcgcccgcatgtcgtccgacactgccaggcccggtgacaccaacttcggcatcaccgccgacaccacggtcggcaatgcgaacgactacacctacggcttcgtctcgggcaatggcctgagcgccggcctgtggtccaactccgagcacgacggcaccaccgtcggcaacaccgtcgccggcggtgcgaggaacacccgcgtgctcacctccacccagaaggtcggcaaggccacctccttcggtctgggcactgcgccgtggtactaccaccgcgtcgtgaccgacacgaagaagcgcacctacaccgtcgaagagaccgacatgccgaagatggccgtcgccatcgctggtgacgagaacgaggacggcacggtcaactgggaagatggcgcgatcgcataccgcgacatcatgaacaacccatataagtccgaggaagtgcccgagctggtcgcatggcgcatcgccatgaacttcggctcccaggcgcagaacccgttcctgaccacgcttgacaacgtcaagaaggtcgccctcaacaccgacggcctcggccagtccgtgctgctcaagggctacggcaacgaaggccacgactccggccatccggactacggcgacatcaacacccgcgccggcggcgccgcggacatgaacaccctgatggagaagggcaccgagtacggcgcccgcttcggcgtgcacgtcaacgcgtccgaaatgtacccggaagccaaggccttcagcgaggacatggtgcgtcgcaactccagtggcggcctgagctacggctggaactggctggatcagggcatcggcatcgacggcatctacgatctcgcctccggcatgcgcaagtcccgcttcgctgacctcaagagcaaggtcggcgacaacatggacttcatctacctcgacgtgtggggcaacaacacctccggcgccgaggactcgtgggaaacccgcaagatgagccaaatgatcaaccagaacggctggcgtatgaccaccgaatggggtgccggcaacgagtatgacgcaaccttccagcactgggccgccgaccttacctacggtggttccggcatgaagggcgagaattctcaggtcatgcgcttcctgcgcaaccaccagaaggacagctgggtcggcgactacccgtcgtacggccaggccgcgaacgccccgctgctcggcggctacagcatgaaggacttcgaaggctggcagggacgcaacgactacgccgcgtacatcaggaacctgtacacgcacgatgtgtccaccaagttcatccagcacttcaaggtcgtccgctgggtcaacagcccgctcgacgccacctccgtgaaggatgcctccgtcaacaacggcaacgagcagatcacgctgaaggacgaccacggcaacgtcgtcgtcctgtcccgtggctccaacgacaccaacaacggcgcgtaccgcaaccgcaccatcacgctcaacggcatcaccgtggcgtccggcgcggtctccccgggcaacagcaacaccgtcaagggcactgagtcctacctgctgccgtggctgtgggacgtgaacaccggcaagctcgtcaagtcctccgatgagaagctgtaccactggaatacccagggcggcaccaccgagtggaccctgccgaaggattggcagaacctcgcctccgtcaaggtgtaccagctcaccgaccagggcaagaccaacgagaagaccgtcgccgtctccggcggcaagatctcgctgaccgccgaggccgagaccccgtacgtcgtgaccaagggctccgagaagcagatctccgtcaagtggagcgaaggcatgcacgtcgtggacgccggcttcaacggcggccagaacaccctcaaggacaactgggccgtctccggcaccggcaaggccgaagtcgaaggcaccaacaacgccatgctgcgcctgaccggtgacgtgaaggtctcccagaagctcaccgacctgaccgcgggcaagcgttacgcgatctacgtgggcgtggacaaccgcaccaactccccggccaagatcaccgtgaccaacggcaccaaggtcctcgccaccaacgagaccggcaagtcgatcgccaagaactacatcaaggcgtacggccacaacacgtactcgaacactgaaggcggcagcagctacttccagaacatgtacgtgtggttcgtggctccggaaagcggcgacgtcaaggtgacgctctcgcactccggcgcatgcgacaacaccgaccatgtgtacttcgatgacgtgcgcgtgcttgagaacggttacaagggcctgacgctcaacgctgacggcaccctgaagacgctcaccaacgacttcgaggacaatgcccagggcatctggccgttcgtggtctccggctccgaaggcgtcgaggacaaccgtatccacctgtccgagctgcatgccccgttcacgcaggccggctgggatgtcaagaagatggacgacgtgctcgacggcaagtggtccgtcaaggccaacggcctgatccagaagggcacgctgatctaccagacgatcccgcagaacgtcaagctggaaccgggcgagacctacaaggtgtcgttcaagtaccagtccggctccgacgacatctacgccatcgccaccggtgacggcgagtacaacgccagcaccgtcaagctcaccaacctgaagaaggccctgggcgaggacggcacggccgagttcgagatcaccggttccatcaccggcgacagctggttcggcatctactcgacctccaccgctcccgacctgcagaacacgtccgattccgccgccgccttcggtggctacaaggacttcgtcctcgatgacctgaaggtcgagcacgtggcatccgccgagcgcaccaaggccgacgccgaggccaagctcaaggaagtcaaggacacctacaacggcaagagcggcgactactccgccgaagtctggaccacgtacgtgaacacggtggccgagatcgaggcgctcatcgccaaggataagcccgactacaccaccgcctacaacaaggctgtggcgctggccgagtacatgaagaacgcaccgggcgacgactcgaacgatgcgtacgacgtggcgaccgacgcctacaccgtcgaggcgggcagccagcaggcactgtcgggcggcaatgagggcccggcaagcctcgcccaggacggcaatgccggcacccactggcacacctcctggagcgccaacgcagtgtccgccggtaccgcctggtatcagttcaacctgaacgagccgacgaccatcgacggcctgcgctacatggcccgcagcggcagcgcgaacgcgaacggcaagatcaagaagtacaagattacgctgacgctgtccgacggcaccaccaaggacgtcgtcaccaatggcacgttcaccacgaccagcggtgtctggcagaaggtcaagttcgacgcggtcaagaacgtcaccaaggtgcgcatcaccgctctcgaaaccgcgggacagtccgcgggcgaggtgaacacgtacgcctccgctgccgagctgcgtgtcaccacggttcgcgacgtgccgagcaccgaggtcaaggtcaacaagtgcgatctgcagaacctgtacgatgacgcttccgccctgaccgaggccacctacaccgccgacacctggaaggtgctcgtcgccaagcgcgacgccgccaagaaggtgctggacgacgagaacgccaccgcgtacgacgtggctctcgcctaccagaacctgaaggacgccatcgccgctctggaagagcgcgtggacacctccaagctcgccggcctggtcgccgatgccgagaagctcaaggaatccgcgtacaccaaggattcgtgggccgcgttcaagaaggctctggatgccgccaaggccgtcctgaacaatgcgaacgccaccaaggctgacgtcgatgccgcgtataacgcgctgaacgccgcgatgaaggccctgaagcccgcctcctccaagccgactccgaacccggagacgaccgacaagagcaagctgcaggccaccatcgatcaggccaaggccctggatctgagcggttacacgaagaagtccgcccaggccgtgcgtgacgccctcgccaaggcccagagcgtcctcgccgatgacaacgccacccaggctgacatcgacgccgcgcagaaggccctcgccgacgcgatcgccgcactggagaaggccgatgccaacggcaacgccatctccaagacgggtgcgaacgtcgccgtcatcggcatggccggcatgatgctggtcgccgccgctggcgcggtgttcatcgcccgcaagcgcgccgagtgatataagtaaatagaaatagggaggtcgccctgtggcggcctccctttttgtgtttggcgcaccacgactctctaccctgccccgctggcgtgggcagggtcgtgcataccgtttgtttggtttgtcgtcgagggggcgttggtttttcgaggggtttagtttccgggtaggtcgtgcgagggtcgcgcgggaggaagggaagcggccgtgatgagccgcatctatgagaggacggtcatgtcgttgaccgcgttcgacaatcgggacatcatctcatgcgtgagttgtctcatgcgggcgtatacagatgacagcatgattgacgttgctaccgggaagcggatagcggatagcacgttctatatgcctggcacggcggatcaagtgaatggtttcgtgtctccacatgttcctatatatcagttgacatctgatcctcttaagccgcctcttctacttaagcaaatcggaactacaagtggcaaagaaaacgaatgccatgatgtcgcttgattctgccgcgtcccgcttgcgagtgtgacggatggtgtttgaacacaaaaggggagggcgccccctccccttttgtgttcaaaccgttatggatggccaggatcgcgtcattctgcccccgtcagcggggggggggcaaatatgtagtcccttgtgttatatttcaggcgtagatgtttctcgggcgcatgtcctccggcaggccctccagcagtgtcgccacggagccttcctcgaagacggagcggatgcctgcggccagcagcggcgccaccgacagcacggtcatgttatccaggcgcttctcctgcggcactggcacagtgtccatcaggatgatttcgcgggcgccgcaattgcgcaagcgctccacggccgggccagacagcagaccatgcgtggcgaccagagtcaccgaggcagcgccggagttgcgcagcgtgcgcacggcctcgcagattgtgccggcggtgtcgatcatgtcgtccaccaccacgcagtcgcgcccctgcacgtcgccgatgatgccatgcgcttcggcatggttcgggcgcgtgatgtcgcgagtcttgtggatgaacgcgagcgggagcccgcccagcttggcggcccactgctcggaaaccttgatgcggccggcatcgggggagacgatcgtcgccttgtccataggcacgtggctgcgcacgtagtcgatcagcacgggcatggcggtcaaatggtcgaccgggccgtcgaagaagccctgctcctgcgcggcatgcaggtcgacggtgaccagacggttcgcccccgcggtgcggaacaggtcgaacatcaggcgtgcggtgatcggctcgcggccctgatgtttcttgtcctgacgggagtagccgaggaacggtgccacgacggtgatggacttggcggaggcgcgcttgagggcgtcgatcatcagcagttgctccatcacccacttgttgatcgggttggtgtggcactgcagcacgaacacgtcggcgcctcgaaccggctccgcgaaccgcacatacatctcaccgttggcgaagtcgtatgcggtggtgggcagcacgttgatgccgagatattgagccacttcattggcaagctcagggtatgcgcggcccgtcaccaaggccagtcgcttatcgggtgtgccctcaaggatcgccgacatgtttttccgctctttccgtcgatagtttcgttaccgttcaccgtggtgatacgttgccgtacacaaaccttatccaatatacaagaacccgccgtcccaagaggaacggcgggttgcgatgctcacggattcttccacttacggcacggtgcgcgcagcaggtgccccgtgccgggcgaaatcattccgatcagtcgtcgtccagcgtgatgtccagcttgtcgccgtccagcgtgaactgcccgctgatgctgaagctggtggaactgtccgtcggctcccaggagtcgtcatagttcttgtactcgtacgccaccttggcttcgccgccgtacacgtagaagctgcccgagtcgatgctgaggtcatcagtggtgacggtcgggtattcggtgatgttccacgcgatgttgcggtagtcgtcatcggaaccgtacatgctgaacgggcagccttcaggctgtgcatccgtggacttggcgcaggtatccagcttgtccttgatcttcgcgttgatctcgtctgccagagcgtcggtcggctcggcagagatcgaggcggaggattcggaggaggtggtcagcgtcgtcgaatccgcggtcagatacttcgacgtgaccggttccaccgtgtacgagcccggatacaccttgaaggtgtaggtgccggaatcggatgctgtggcgttcttcgcgccgaccttgacaccgttgacggtgaagttggtgatggccggtgacgcgtagacggagatctccttgaccagcggcgtcgtgatgttccagttcttgaagatcaggaacttggatccgttcggagcgaccgtcagggtgtcggtcatggacttgccgcccagcgtgtacgagatccgcatcgtgcgggagccgtccgcgttgtcggtggcggagatgatgcgctggttgctgatcgtggtcttgtcgcccttggaagccgcattggtgagcagcgtgcgcttgccgttggcgacctgcgggtcggagatgccgttggccttgtcatagtcgccggacgcgatggccgacaggtagctcttcacggtgttatcggcgctgaacacggtggagttgaccactgcgtaagcgataccgagcagggcaagcacgccgacgatggagctgatgatgatggccagcttcttctgctgcggggtcatggccttggctgcagccggggcggcgggagcagccaccggagcgggggcgacaggtgcagctgcaggagcggcaggagcgccggcaggaacttggacagtcggggcaccaccttgggcctgaaaggccgcggcgtcggtgccggcagcgggaaccccctgaaccggagcaccgggaaccggaacgccctgaacgggaacgccctgaacgggaacgccagctgcgggcgcggtcggcgctccggtgccggcaccaggctgtccgccgaaggactgctgcgggcctgtgtagccggcggccgcggcgacctgtgacgggaagcgaccaaagtgcgctccgcatgccgccgcatacgcggtgacctcggcgggcgtcgggcggaccgtgccgccgacgaacagcttccatgcgccgcccatcgacagcaccatggccgggccgaatgtcagcgccaccacctcgatcaggaacgaccatacggccgcgacgaggaagtaccatgccgcgatgttcagcgacacgtcagaggtatcggactgcatggtgtaacccagcgtcacagacgtgaacaggaacgtgacgatcagccagatcaccagcgtggcgaccggagacttccacgagtgctgccatcccgcatatgccggatcatagatgttgcgggccgcggcgcgcaacgcaatgtagaacgtggtgataaggaacaccacgaataccagccacagctgccacggtgcgctgatggagccgccgtactggttcgagatgccgaacagcgacaggttagcgacatagccggggacgtcgatgccgaccgcgccgaacgagccgagcgcgaacgtcaggaacgaaaggtacggcagcagaatcgggaacagcatgaacatctggccgttgtgcaggttgctggacagcatgatcaggcaaatgaagccgatcaccgtgaagacgaccgcgtagatgaacgccgcatcaagcaacgtgcgcacgaagccgcgcgtgcggtgagcccacttccaggccgcggtgaacacgttgttggaatccgaggcgtactgggcgagcagatagccgaagaacgcgccgatcgcggcgagcagcagcgtcatgaaatacgtacgggcggagacgccggtcaggatggccttggcctgaatgctgcccatgctgccggctcccagcgtcagcgggaagatcgcggcgagaatcagatagacgaatcccatcacgacgccgacgatgacgctgctgacgatgccggtccacttgaaccggatggcgaacttacgcgcgaaccagtatgcgccgaacgcggtgccgagaaccagcgccacgccggaaagaccgacaggcatccatagatggccggacacgccgaaggacgacagggagaggttgcctccggtgatgttgggcgacagttgaccggatacgcccagaaccatcaccagaatcaggaactggaagaagttcggcgtcaccgtgccggaaccgctggcgtcactcatcatgccggacaggccggggaccatgctcagcttggacgcccatgatgagccggccgacaaaaagaagatggagccgatcagggccagcgccatcgcgccgatcaagccgaaggcaaggctgattgcggcggtctgcagcgaacgcgcggagaacagctccttgaacatcgggttggggacgaactgctgcggagcgccgggctgaaccggggcgctgggtgcgccgggggtaacgggaacaggtgcgccggggacgggagcaccaggcgcgggcgcagcaaaagtgccgggagccggtgctgcagccgcaacaggtgcggcggcgggaacttctccggccggagcggcgactggcacttctgccgccgggacgggagctgcaggagcttcttgtgcggggactggttcgggaaccgccgggaaggccggctcggccgcgggctgttccgcgccggggaatgcgggtgccggctcgggctgcggtgccacggcctgcggggccggtacgggttcagggaatgcggcgacgggagcgggtgcttccggctgaggcgcggctgcggtgccgtgtggagcggtgccgagcacggtcgaatcttcgacgttgtcgttgctgtttgctgcggcgaccgcgagcgtctgcccgcattgcgtgcagaatcgtgcggcgctggacagcgtggcgccgcagtgaggacatatcataacaagcccctttcttggtttgctcttccctccttattgtacagtcgccacgtcatcttcagcagcttattcgcggtatttgggcggggtatataaggcatgttttcgcccccatcgggcaggtaatccgatatccgataggggcgaaaacatgccaatgcattctctgtgcctgtggcgtcatctgtccatgaatacgttgccgttggcggcgaggcatgccagcacttccggtttcttcatgtcatacgtcgtgttgacggtctctccgggagcggcgtgacccattgcgttcgcctccttctcgtattgttcgacggtgtaggatttcggcaccagcccggcgcgcttaaggcaatcgactgccccctcctcatgagacgcatacagattgggattgccgacttgtgccatatacaacgcgtccaccgaatccacggtggcgattccacacgcgttcaagtccttggcctttttttggatgtagtcaaggtcatcggctttatctgaaggaagtacgtctccctgcggctgctggatgccgttggagtaagttttcagtgtcggcctcggatggcccttgtcttggacgcacgtgatgtatcggctccatgcggccttgtaatcggacagacttattttgccgcttgtcgcggccttgcgcagtgtcgctttctgcgcggggtccattccggagtcctggccgagcagctgcgtcgcataagcctgcaaagatgaggcgagacgtttcccgcccgagccggaatccgttgcttggttcgtgttccgtgccgtgccgcatccgcacagcatcgcaatggaaagcgtaatgacggcgatgacggcgatggccatcgtcaccgtacgacgggatgccggaatatgccccattcttactcctcttactccgatatgcattatctcaacgtatgagaatgtctttttaccaacgggtgacactcttccccgtgacagcactattgtttgccatgcgtatccacaaatgcggtcctagtttcggcgaactcatggtcgcacctttgtattgatagatcacaaaaccatgcaagttcccggtgtagtacgcatttctatacggccaagtgccgggcacagctccacttccggcgaattgcatattcccaagtgcgctaccgcttgtccagcatccagcgttcttgtttgtgcatccccttgttacggtgatggcgttgacattcatggatgaaggaggaatcacgtttagaagtttgccggtcgatggttctatgactgctgcagagccgggcttggccatgatgattttgctgccgtctgcatcagtgacgacttcatatgtggagtcaaagccagaagcctgcttgggcgacatcgatacgaacgatgcggcgaaagtcagcaaaacggccaacaatgttatctggaaccttttggttgccggcatgataatctcctcttcgagatttcatcagtcttcaaattttatatctaaaagacatctcggtcaaatggttgcggacgtcatttggggtccgtatcgcagtatatttgcaggggaatgctgtcatgcagtgtaacgttgaacgcaggatagtcatgaggagagattatgcggtgttcccgttgtggtgcgaatgtcgttgagggcgatagattctgcgagaactgcggggcgcccgtagccgtgcaggcgggtcccgtgtgcccggtgtgcggtcagcagtcggaacccggcatacggttctgccagcagtgcggtgccgagctgtccgccggctcgcagcccgcacagccggtgccgaccgcccagccggtgcctgctgcacagccttatcaggctgttcagcagtacgcggggcaatacggtgccgcccagcccggtgccgtcttcccgccgcaggccgtgcagccgccagtccaaccgtcacggcctggagagtccgccggcaagggcaagaagaagaccgcgctgatcgtcggcatcatcatcgccgtactcgtcgtggcgcttgccgccggattcggcgtctggtggttcatgctgcgtgattccggcacccaatcggctcagacgcagtcgacatcccagcagagcggcaagaccaagtccggcgacagcaaggccgcgaaagacgacaagccctgcaccgctgcgcccgatgccgagctgagttccgtcgaccacagcgacgccaatctcgtcgcgcagctgcagctcacctccaactgcgcgtcgacgaaggacggcgacacggcggagttcaaggaatccgacgtcaaggtcagcatcaaggacgatgaaggcaatgtcatcgcctcggccgtcttcgacttctccaagcagccggtcaagttcaatggcgagacggccaacgtcgcgctcgaattcaccacgaggcagtactggcgcccgtacgaccagatcgagaccggcagcaccgaggtcatcctgcagaccggtcagagcggcaccggcgaggcgggcagtgcggacggcgacgcgttggcaggctccgacatcaacagcgaggacgccgagcggtacgcgcagcttgcgttgagctggcagctcaagcatgacgaatccgccgcatcccgcttctacaccacctacaccacgcagctgtccagcaagaaaaacgacatgaaggccgacggcaagacctggcattacgtggacatctacgagcagttcctgcagcagcgcatcaagcacaagaacgcgatcctgatctggtccggcgattacccgacgtacacgaaggccgacgcttcgaccgcgtattacgtgatcctgtcgggtgatacggtcgactcggtgaaggccggcgacgcatggtgcaagtcgaacggctatggtgccgcggattgcgcggtcgtggatttgcagtaggacggattactccccagtcgcttcgcgacagaccccgcaagctgtcgcgggcatggcgtagcttagagaagttgctgttttcagcagcgcgtatacacactcctgccatggatagtccatggccgactagtccgaaggaggtgggtgatgtctgcgcataagtacgaactgatgttcattgccgatcctgagctggatgagcgcggtctgaagaagttgaccgagcagtatctggagctcgtcaccaaggaaggtggttccgtcgagaacaccgatatttggggacgtcgcaagctcgcttacgagattgacggcaagaccgaaggcaactacgtggtggtcaactacacgaccactcccgaggtcagcgccgagctcgatcgtgtgctcaacctgaacgaatccgtcgtccgcacgaagattcttcgtaaagacgccaagtaagccgtatgagtttctgattgttcgcgactcgctgaaccaaaggtaagaaggtaagtcatggcaggcgaaaccatcatcaccgtggtgggcaacctcacggcagatcccgaactgaggaccacgggaaacggcgcttccgtcgccagtttcaccatcgcctctaccgcgcgtacctacaatcgcaacaccgggcagttcgaggacggcaatgcgctgttcatgcgctgctccgcctggcgcgatctcgccgagcattgcgccagcacgctgtccaaaggcatgcgtgtcatcgcgcaggggcgtctccagcagcgctcgtatcaggcgcaggacggctcgaaccgcaccgtcatcgagatgacgattgatgagatcggcccgtcgctgcgttacgcgaccgcgcaggtcacgcgcacgtccagcggcaacggccaaggcggattcgccggccgtggcaatggcggcaatggcggattcaacgccggtcagggcaatggcggcggtttcggcggcaacgccggcggctaccagggtggccgtggcaatggcggcttcagcggtggctatcagggtggcggcaatggcggctaccagggtggcgcgtccgctgcgggcaacgccggccagagcgccgcgcccgcgaccgatccgtggggcacgtccggcgatgccggctcgtccttcggttcgttcggtggctcgtccgatttcggtggcgattcgcaggaacccgagttctgatgcccgtccgcggccatatgaagccgcgcgacgcacgtaacaatccagaagcaagcattcaatcgtaattttcaaggagaacatcatgtcacgtaagaggccgcaaccgccggtcaagccgttcaagaagaagccgaatccgctgaaggccgccaaggtcaccgagatcgattacaaggacgtcgcgctgctgcgcaagttcatctccgatcgcggcaagattcgttcccgccgtatcaccggcgtgaccgtgcaggaacagcgcgagctctccaaggcgatcaagaacgcccgcgagatggccctgctgccgtacgccaccaccggtcgctgagttagggaggataagaaatggctgaatccaaggttattctcacccagaccgttgccaacctgggccactccggcgatgtcgtcgccgtccgctccggctacgcccgcaactacctgatcccgcagggcctcgccttcgcgtggaccaggggcgccgaagctcagatcgtgcagatgaagcgcgctcgcttggccaaggccgtcgccacccgcgaggatgccgtcgccgccaaggccgccatcgagggcactaccgtcgagatcgctgccaaggtttccgagtccggcaagctgttcggtagcgtcaccgccgagcagatcgcgctggctctctccgacaaggccgcggtcaacccgaaggccatcgaggtcgagccgatcaagaccaccggcgacttcccggctaaggccgccctgcacccggagatcaccgcctccttcttcgtgaaggtcgtcgccgagtaacttcggcccatcagacagattatcgtctgagcttaagcatcagcccctccgccgctccgcgcggcgaggggctttttgtattgttccaagtcgcagcgaatgattctcaataaggaaggtgcgaggattgcgaacatttacgcacaagtgaacaatatgagaaaacgctgttttccaaggatttgcggacattgatgttcatttggagttgcggcgggctcgcacctttcttaatgagaatgatatgctgcgaggatgggcgttctcaagacgcggaagccaagccagccccgttcaactcgttgacagcggcgaacggcatcaccctcaaagccggtgagtccctgctgttcaaggccggcaccacctgcaccagcgcgacccagaccatcgacggcgcctcggtcaagaccggcctgcgcgtcatcaacgccaaaggcaccaaggacgcgcccatcaccatcggagcgtacggcgaaggcgccgcgcccatcatcgccggtgcgggcgtcagcgagaccatcctgctgaagaactccgaatacatcacagtgcagggcttcgaagtcaccaacactgatgcgaacgcggccgattacgaaaaatacatgcgccgtggcatcgccgtggacgctcggcaacgtcgacaacacgaagaacaacgacgccggtggtgccactcggcgcccgaagtccgaactaaaccaggccgacgccgtagtctccggcgagtacgcggcgaaactcggcgaacagctcaccccgtacaacgacgacaccatcaaccagcgcacgctgtccgagacgccgggcaagacgtaccgtctcggcctgtgggcgacgctcggcaagagcaacgacgacaccccgtccacgctcaaggtgcaggtcaagtccaacctcgcgtcgcttggcgccgtcagctcgttcagccagtaccgcaagaccgtgctgagcgagaccgtggacgccgaaagcaaggaaggcggcaaaaatcactacagcgggtcgttcatcgtgccgctcgacgtggacccgtatgccgcgctgtgggtcgccatctcgcagaccgatctggcctccggctcgttcgcgtacatcgacaacgtcacgctcgtcgaggactccgcggccgtgtccgacgtcgcgtcgatcgccgtgaccaagcagccgaccaagaccgaatacgccatcggcgacgcgctcgacctgagcggcatggccgtcaccgccacgatgtctgacggcacaccgccgagctcggcgagggcgaatacacggtctccgagttcgactcgtcgaccgccggcgaaaagaccatcacggtgacgtacgccgccgatacctcgcttaccgccacgttcaaggggacggtgaaggaggccgagccggtcgacaccgtgccgccggtgatttccggtgcggatggcgtggccgtggagttcggtgtgtcgtttgatccgatggcgggtgtgaaggcggttgatgatgtggacggtgatgtgaccggtgccgtgaaggtgtccggtgacacggtggacacgagcaagcccggcgcgtacacgtcggtgtacacgtgagcgatgcggccggtaacgaggcgtccgtgacccgtgtggccaccgtcaaggagaagtccggcgagacgcccgcgagcctggcgacaaggatccggacggcggcaaggagcccggcaaggagccgggcaaggataccgacaaggacggtgataagaacgaccaaggcaacaagaagccgggcctgtccgcgactggcgcctcggtgtccgtcgttgccatcgccgcaatcggcctgcttgcgacgggcgccgtgtctgtggcggttcgccgccgtcgcgacatctaaggcgcggatttcctgagtcgcgttggccctgatcggctcagggccaacgcatggcattgatgccggtcgaatggctgtcccattcgaccggcatcttcgtctattttggccttgcccggcgtgattccacgatgtatgtgctgctatcttcgtttcgaggggttgattccactgcctgggaacatctatctgcgtttcagggggtggccaaaacactatgcacggagtatatagggcatttgctcattgaaatcatgcggtttgcgtgatgtttatactttgctaccaaccccctgaaacgcagatagatgttcgtcgcggcctgaatcaaccccttgaaacgcagataggggcggattgcgaggatcacccgggcgggggcatgcttccagtggcgaattaggggtgatttgactcgggcgcaccctctcgacgaaaacaaaaaaggtcagaatctttcgattccgaccttgcttgtgcccccgcagggattcgaaccctggacacgctgattaagagtcagctgctctaaccaactgagctacaggggcgttggtcatttcttgagccgagtgataactatactcagaactcgctgcgatgcaaatcggcgtgttgcgtacggcgtgtcgcgagtaattccaatgggtttcacatgactgcacccaagtgtgcatggcagggcagggtgtgaatcaccggggattctgccgtccaatccgcccgtatcgccgttcgtcaaggggtaaagtgtacaatcgcgtcgtttgctttcgcacccagcgaaattgagtcgccgggagtacgagagaaatccaatcatccagagaccgtgagcagtcagccatgtctgcgatgcggtggagagaaaagaagaagccgtggaatattccctctttaccaagctggctgccgagttcttcggcaccgccatcctgatgatcttcggcaatggctcggtcgccaacgtcgaactcaagaacacgaagggccaccacgccggatggctgaacatcgccatgggctacggtttcggcgtcatgttcccggtgctcatgttcggcggcgtgtccggcgcccacatcaacccggccatgaccctcgcccaggcgatcaacgggctgttcccgtggagcgacgtgctgccgtacatcgtggcgcagctgctcggcgcactgctgggacagttcatcgtgtacctgacgtattacccgcactacaaggagaccgaggacgcggaagcgatcctcggcacgttctgcacgaccgacgccgacaacgacaagatcaactacttcctcaacgagatgtttggcacgctggtgctggtgttcggtgcgctgtgctgcctgatgctgccgtggggttcgaaggatttggcggccgcgtcgatcgtggttggcttcatcgtatggggtttggtgacctcgatgggtggcccgaccggccccggactgaatccggcccgcgacctgatgccgcgtctgctgcacgcgattctgccgattccgaacaagggcacctcgcgttggggagaggcgtggattccggtcgtcgctccgattgtgggcgccatcgtcggcgcgtggctgtacgtgttcttcttcgcgtgatttttgcgcgaaccgcgtgagccgcggcgggctcgcgtgacgccacgcgtgttgcgcggccccacggctgacgggatacaatgcagggagagacgcctgcgaaaagcgtgcccttgtgctcgcgctttcgcggggcggcgcggcttgacctatgacgttgctgggagtgattgaagttgcagcggttgcgtggtgacgatatgcgtcgggtgttccgcgcccggcgcattgccgtatgtgcggggttgattttgacgctcgtgttgtttgttcttgcggtgcgggcgagcgtacttcgcgtgccgggcatgggcggtgagcggtcgtccatcgcgcagtcaggtgcaacagcgcagccgcagtctgcgggggagcagaagggcggcgattccgcgaaatcgtcggccaccgcgaaatccactaattccgaggcacagtcaaacgggtatgacccctcgaagccgttctcgcaggcgcagcggcgcgagattctcgagaaggcgcagcagaccgcggcggccagcggcaaaccccgccacgaataccattactgtgtgtccaccaaggggagcgtcggcgataccggcgagtttgggcgcacagtgtacgcgacgctgaatgattcgcgtgggtggccccgtgccggtctcacgttcgtggagagcggttccagcaagtgcgacatgacgtatatcctggccgcggcggagtatatgaaatcgttttcgtcgctttgctcgtcgcagtacagctgccgcgtcggcaatcaggtgatcatcaattatgaccgttggcgcaagccgaccgacagctggctgaagggcggcggcaatctggcgaattatcgcacgatggtcatcaaccatgagaccggtcaccggctcgaccatcgcgacaatgaaaccgtatgccagcaggcaggcaagccggcgccgctgatgcagcagcaatcgatatcgttgcgcggctgcacgatcaacgaatggccgctcgactcggagctctgggcgcggtggtgatcggacgattcgcgccgacgccgtccggacgaatgcatatcggtaacgtgtatgcgatgctgggtgcgtggctgtcggctcgtgcgggtggcccagagcgtacaagccggacgggcggtggagcgggcgatgcggattgcctgaataacgtgaatcgcgtggatggcatgagtggcgcagccgatccgggcgatgcggacggcgggcgagggcgcatgctgctgcgcatcgaggacatcgacaccccgcgcgtgctgccggacgcggaccgctggatcatggacgatctggcatggttgggactggactgggatggagagccggtataccagtcgcggcggctcgacatctacgagcaggcgttgcgcgcgcttcagggcattgacttgcgaggcgctgccgcgttcggtggccgtgatggcgttgacggcaccgagaccactgcgctgatatacccgtgtttctgttcgcgcgccgacatccgtgcggcctcggcgccgcaggagggcgaccgtttcgtcatgtatcccggcacatgccggcgcgcgctcgccgagcatccgcgacaggtcgagcaacgcttggcgaatggtgatcggcattcgctgcgcatcgccatgcccgtcgccggcgacgcgcgtgccgtggtcaccgtgcatgatcgcgtgttcgggaactgccgattcgatttgccgcgcgatttgggcgatacggtggtgcgacgggcggatggtctgttcgcctatcagctggttgtcacggttgacgacttgctgatgggtgtggatgacatcgttcgcgggcgtgacctgttgcgatccgccgcgctgcagctgtacatccgtgagcggctgctcgacgccggcttcggggatagctcggatggcggcgttgccgcggctcatcgcgatatccgtttcgcacatcttccgctgatcgacaatgcggccgggcggcggctcgccaagcgtgaacggtcgctggatatgggaacgttacgcaaacatggcgtcacggcgcatcgggtgatcggctattgcgcgtggctgctcggattgcagcaagagcccgagccgtgcgctgctgccgacctgttgcatggattttcgtgggatgcgctcgccgcagattcgcaggatcgttccatccccgacgacccgttcagcatcggattgtgagatttcctcctctatatgctgcgtgcggagccgtttcgcgcttcgaaccccccccagtctcgcatcgctcgacaccccgccagcgggggtccacgccggaagttcccggtttctctagccgattcgccctcatccgtgggcatactaatatatggtgcagcaagacggatagggagcatatgatgactgcttacatggatcacaaggatctgaccaatgaaagcatcgacgagacgcgggcgacgcagattcgcgatggcgtgcatcgcgtgcttgacgccatcgccgaagccgagtcggcggccggtcgtgctcccggttcggtgaagctgctggcggcgacgaagacccgtgatgtcggcgagatcatggcggcgatcgatgcgggcatccgcatgatcggcgagaaccgcccgcaggaggtcatggccaaggccgagggactgcgtcgcctgtgcgcggaccgaggatttgcgctcggcacaggcgacggcgacaccactcgaccgtctgacgccgaacacatcccgttccatctcatcggccagctgcaggccaacaagatcggtaaaatcctccccgacgtcaacaccatcgaatcggtggacggcgtcgaactggcgcagcgcatcgcccgccgtgccgtcgcccgtggaatcacggtcggtgtgcttctggaagtcaacgagtccggggaggcatcgaaatcgggttgcgacccgcaggctgccgtcgacatcgccgcacagatcgcgcagctggacggcatccggctcgaaggcctgatgaccatcggcgcgcacgtcgatgacgaggccacgattcgcgcctgctttgcgcatctgcgcggcacgcgcgacacgattctcgcctctcgcgcgcccggcaccgagcactgcacggaactgtcgatgggcatgacgcacgacatggcgctcgccatcgcggagggtgcgacgattgtgcgcgtcggaacggcgattttcggcgaacgcgcgttcatctgacggattgcggcaggcctcggcggaaaggggccgggctgtagcgcccgcgctgcgctgccggcttctcgactgccgtttgatggtgggcatacgatgggggtattggtgtcggctgacggcaacgtgaggtgagtgcggtcatgaaacgtgatgatatgcgggcgagccgcggcgcgcggactgacgagagtgaagagggtgccgtgccggtgtcatcgagtgatgatatccgtgtccatgccgtggtggcgggtctggtgcagggcgtcggattccggtatttcacggtgatgaccgccggcaagctcggcctgggcggttgggtgcgcaactgctacgacggctcggtggaggtcgaggcgcagggggaacgcggcaaggtcgcccgtctgatttcggcactgaagcaggggccgcgctatgccgatgtcgaacgagtggacgtcaccgagatcccgctacaggagctgaagccggcccgtcatgggttcccctcgttcggcgtgttctacgagcgatagtttcgggtctattgagacggaactgttccatcggcagatgatggtaaatgacgttagccgatggttcagcccactgtcagaagcaatatataactctgcccccgctggctggctcttgcgaagcgggcaggagcggtttgcgttcctaagtgcgcgctgaaacgttcagcctgcgaacataagaacgcaaatcgcacgttttgcgttcttatgttcgcgtactcgtcgatacggcgcgcacttaggaacgcaaaagagtccgcgtaatctcacgacgagagcctccctcagtcttgttgtgctttggcgggagcagacacttcgctgatacagcggtataccgttatgtaagaggcctcaggccttgatctaagccgtatttcggtatattcccaagaattttccccgtagggaagggggtatggcctgattcccgaggaccttatgccgcaagggctgtgaaagcggtttttctgcgggggggggggccatgtattcggcgtttttacaatgtttcgggggattgcgtcgatttttgggtgcggatacggtcaggagttaacaggccgatggaagtcgatgatttgcgcgtgctgcgacggtgagagtcgcaatcgtgagtctttgtcgaactgctgaacgccggatgaagagttttggaaatgatggaagggatgcttatcgtgactaagcagaatcggaaaccatcgcatacgagggcgatgcgctctcgcctgatcgcggccgccgtatccgtcgcgaccgttcttggacttgccgtcaccggcactgcgattgcggccgatgcagggacagccgcacccgaagccgcgcagtcggccacgacgcaggcatcacaggccggcaccggcccgatcagcggcgtcgcacagggcgacagcgctcagcagggggtgccatctgccctgaccgatcgcgccgggactggtgcttcggggcagaccgccacggtcaaagcgtcggctgcgcctcgcgccacggcgaacgacggcaaagtgaagattaacctattcgattattgggacagcagtgatccgaagggcccggcaaaggccgctggcaaagagaacgtgaactatgccacgggcggtaccagcagaaatgaggcggctgcagcattctacttcaactacttcaacggaaaaggtaaggattggaacggctggactggcagtgcagaaacctctccgggcatcgtcaagacgaacctcaccaagaccggcgctgatgcagttccgcagttctctacgatggtgaccaataaaaataatgcacagaccgacatgacgtatttgttcacagaaagcgagtgggccaaggcatataccaatggcggcaatgggctgacggggctgttcgatccgacggaagaggccaagggccactatgtgtacgactccaatacgacgtacgccgcgctgaacagtgccggtaccggatttgaccggtcagcaacatggaccgagagaactgacgcgtggattccgaaattcctgccgttcaatgcggataaaagtcagctgcggatcggctttcattcagtgcgcggcgcccggtacgccttcggtatgaccgcatacgcgaagttcatgcaaccgaaagaaggcaaactcgttgatgattccccgatgacgttcaacttcacgggtgacgatgatctgtggctgttcgtcgacggcatgcttgtgttggatatcggtggcatccatgatgccgccagcggctccattgatttcgcgaccggtgtggtgacgattgtcagcaataaaaccactacgaccacgttgcaggcgttgtttactcaggcgctcagggaccaaggcaagtcggatgccgagatcaccgcttggatggaatccaatatggtcaaagcctccaatggctcctacaccacgttcaagaactacaccagtcacgagatgaacatgtactacttcgagcgtggccatagtggttccaactgcaagcttgacttcaatttggtgactcttgactccagccatattcaaatcggcaaggagacggagaacgttcctgaagctgacaaggacaagaactatacgttcaacgcttatgtcaactatgagggaaccgacagtgacaaggattacacgttgtacacgggtaaatacgacgtgtacaacaccgccaccggcaccaaggacggtgaaacccggatcacggattccaatggcgtgatcacgctcaaggcgggccagtatgccgtgcttttgggcagcgacgccaagaggatcaccgagtcctcgaagtacaaggtgacggaaatcaacgttgaccaggacacgtatgcggtgagcgccaatggcggtcaggtcaaggtgacgcagaagaaggattctgcgaccacggagccggtgtcggtcggtgaggtgccacgtaccacggtgacgaacacggtcgtcacggcgccccggtaccgcaagtacgtcaaggcgaacaatgatggcacctatgacctgtccctgaacgtgaccggcacgcagtccggctcgtcgcagacgaccgtgtccccggccgacatcgtcgtggtgttcgacacctccggttccatgagtaacccgatgggacacaactctcgtcttgaggttgcgaagactgccgtcaacagcatggcgcagcatctgctgacgtctgagaaccagggcaaggatagcaacatccggatggcgctggtccccttctcgacgacggtgggcaatgtgtcgaacttcaccgacaacgcaatggacatagtcagtgccgttaatggtctgcgcgccgatggtggcacgaattgggaggccgcgcttaaagccgccaatgccaagctgacttccggtcgtaagggcgtgaagaagtacatcgtgttcatgtcagacggcgacccgacgtaccgcacgagttccgtgcggaccggcactgattggttgggtcgtccgacctatgatgacgatgatcgcaggggtcttcctgccggggttcatggttctggcagcagtgatcgatatggggcgaatctcagctccgctgttgccgaggctaacaggcgtggcgatgcgacgttgttctcggttggcgtgtcctccgatccgaccaagatgcgtggcttcgccgatcagacgaagggctcgtattacagcgccaccagcacggatgagctgaacaaggcatttgccgatatcatcggtcagatcaacaggaagtcttcgtacaagaacgtgtccatcaccgatacgctgtcggactacgcggagttcgttaatgctaacttcggctcgaatgatgtgacggtgacggcatctaaagacggtaatagtgtcgatctcaacgagagcgattacacggttaccgtttcgggcaagacggtgaaggtcacgttcgcggacggctatgagcttcaggatggcgtgacgtatacggtcacgttcaaggtcaagccgacgcagaaggcctacaacgagtacgccgccaacaagcagaatgacgacaagaccggatataaggatgttcttggtgccgacaacactgatgcggatggtcaccatacttcgtccaatttgcccggcttccattcgaatgcggatcacggcgcgaagctggagtacaccgtcgtcaacacggtcggcgaccagaccaccgagaccccgggttccgtggagtacccccaccccgtcctgcaggtaaagaccggcaagatccaggtgaccaagaactggtccgatggagcggagaagcatgggaatggctcggtgaccgtcacgttgaagcagtgcaatgcgcaaggtgaggattgcaaggacatcaaccggaccgtgaccctcaacaaccagggtcagtgggctggtgcgttcgagaacctcgcccctggcacctaccgcgtggaggagtccagcgtggacggctacacggcgtcctacaaccccgagaaccagttggtaaccgtcactgccgacgacctgtgggcggctccggataacaacaacatgacgaccttcgacaacgtcaagacgtacccggtcacgatcaccaacaccttcgttgccgtgtccgctctgccgatgaccggcggcgccacgactcgtgactggcttgtgtatgggggcggcttcggcctgctcgcggcactggtcagaatcggatacttcatctggcgcaagcgtcggctcgtctgacctgcggcggatgctccgccctcctccctcgtcggggagggcacacgggggcggcgaccagtcgcccccgacaactcaagatttgcggactgcggaagcctcaacgactgccgcttccgcagttgcaataaacaagacaacgaaaggaagatgagtttctcatgaagttcaagaagcttttcgcgggtgtcgcagctgcggccacccttctcgctggcatggcgttcggcaccggtgccgccaacgcggccgagacgacagtggacactgctgcaacagtcacgttcaaagcgtccaaagaaaagcagctgaccagcgcccagctgagcgcatacaagatcgcggactacgtgaactatggcactgccgaaaacccggtgtatggtgtgaagaccgctgcgggcgccaatcgcgcgaagctggctgcggctctgaccgccgccggcttccagaacgtgccgatcgatggcaccactgatttgatggcttgggctatgaatcaaaaaacgaccacggatacggatggtaccgtcacgcaggttcagttcgatcagtccgagacccgtccgtggaataatccgtccgtgacgcgtaagttcgcggatgcgctgcaggccggcaacccgttcaccgccaccgcggatccgttcgtgctgaacaaggcgactggcaacgacacggatggttggaccgccacgaacaagaccgcgctgactgctggcgtgtatctgttcctggacggcaacgcatcgaccgataccctgactcaggccgtcccgatgatcgtgagcaccggctccgttgatgctgagggcgttctgtcgcttggtgatagcaccgcagaagtggacatgaagagcacggtgagcggcacccagacgaagtccaccaccagcaagagcgcgtccgtgggcgaaaccgtgccgtttgaactgggctacacgattccgaatccggtcccgaccgacttcaccctgcagttcaaagatgtgccaagcaagggcctgaccgtcaacttcgccagcctgaccgttaaggctggcgataaggtgctgactgacaccgattacacggtggaaaacaacctgactgacaacaagggcgacggcaccaatactttcgtggtgaagatcaccgacccggccaagtacgccggcaagcagatcaccatcacctacaacgccaccgtcaatgacgaggccgagacagtcgagggccaggattaccacgcggtgaccaacaagcttgtcggcaatgatggcacccccatccccggcactgaaaccctcaccaagatcttcggcttcaagttcacgaaggtcaacgcccagggtgaggccgtcgagggcgcgaagttcacgctgagtgtcgcaaaagaccagaacggcgtgctgccgaacagcgataagtacccgctcgaagtcacgtccggtgccaacggcgtcgtcaagttcgacggcctgaaggccggcagctacaccgtgaccgagaccgcggtcgccgacgggtaccaggacttcaaggcctcgttcaccgtggccatcgatgaaaacggcaaagtcaccttcgccggcaccgactcctggggtctcgcgcccaagggcagcgccgacgactacaaggtgaccaacgtcaagtccgtcttcgaactgccgaagaccggtgctgcgggcatcgcgctgttcgtggtgatcgccgcgctgctcggcggcgctgccgccaccgtgtacgccaagtctcgccgcaccagccgtgcgctgcgctgactgacacgataacaggccaagccgccgcatgacatgcatcccgcacgagcatggtggcggtttcggcttgctgtaaccgttcgcccccggcaacacccctgccgggggcaacacagtacatacacgaattcgtttcacggcgactgcagtgacggccggcacaacaacaggaggatgcgcatggcatcgaggagacacggatcgaaacggccggccacctcatccggcaacgatccagccgtcaaatcctcccatgcgcccgcacggtcaacgatgacccgcagcctgccggacaatgatgagcgatcctcgaataattcccgcagatcctaccgaaacagccgtcacaaacccgccgtgcagccgcagctcccgtactcgatgctgagcttcaatcaggcgaccgacatctccgaccttgtcgcgcaacgcaaacgactgcgcatacagctcatcatcatgcgcatcgtcacgctgatactggtcatagccgctgtcgccgtcgccggatatcccctagcgctccaataccagagctcgctcaaactcgcccaaacctcacgcaacagcgcacagcaggtcgccggctggccatacccgcaagccgaagacgccctcgccgcctcccgcgcatacaacgcaaaactcgccagatccggtcaacccgtgctgggcgaggccatcgacccgttcagcgccgcacaaggcgggtcgagagccaaaggcgaggattccgccgcctccaaagacaaggaataccagtccctgctcgactcgggcgacgaagtgatgggaaccatcaagatcccgaaaatctccgtcaacctgccgatctaccacggcacgtcacagaccgcgctggcctccggtgccggtcacctgtacggctcctcgctgccggtcggcggggacagcacgcactccgtcatcaccgggcaccgcggtctcgtcaacgcgatgatgttcacgcggctcgacgagatgaaaaccggcgacttcttctacatcgaagtgatgggggagacgctcggctacgaggtcgaccgcatcaccgtcatcaacccggacgacacgtcgcaactcaagatcgtgcccggcgaggaccgagtgacgctgatgacgtgcacgccgtacggcgtcaacacgcagcgcctgctgatattcgggcatcgcgagccgatcccgatgccggcgccggacccgtccgacctgcatgacacgcgcaccatcgtgacgatggtggtggtgtgcgggctgctcggcggatggctgctgctcggcgtgatcgggcggattcgccggctgccgttcaagccgatgcggcacgcgtcgtcgtggccgcggcgcatgcgtgggtgaggtgcgctgggttcacgggggcaacgggggtgtcggcggcgtcgccggtgaggtcctcgaaggcggacttgcaaggttttcgagggatctcgccgtgtgaatcgaacttgccgtgagatgaacatgaacttccggtcaataccgtgcatgtcacggaaagtgggtgtacgctgaggattggccgatcaggtgcatacagcgttgcatgtggccggttgcggtaacaatgatttgacccggtcaacggggctctctgcaaaagggggacatatgagcaacacgtatccagatggagcgccgcagactccgtatgttgatccgaacaatgcttcgggcgcggaaggcgcgcccgaaccgcagccaacgcaggctttcccgccggtgccggtcgttcctctgcccgggcagggagcgggcgcgccgacgggagccccagccgccccgtacgggcagggcggggccccttatggtggtgcgccgactgccgcgtacggcgagtcgctcgccgggccgcagggcggcgccgagccgtatggacaccaggcggcgccgtatgggcgggaaccgggagcgtacggacagtcgggcgctggctccgcatacaaccagggtggggctccttatggtcagcagcctgaacccggtccgaaccccttcagccagcccgatggcggaactccgtatggtggcgaggcgcctaccgccgcgtacggtgagccgcttgccggcgatgctccgggagggtacggtcagccggccgcaccgtacggcggagagcagccgaccgccgcgtacggacagccatacggcgccaaccagtacggtggtccgcaatacgggaaccagccgccagcaatcgcgccgcaaggctacggcaatccgtaccagcaggaaccgccgaagaagaagagccgcggcccgctcatcgccggcatcaccgccggtgtcgttgccgtcatcgccatcatcgtcgtagtcgtgctgttcgccattggtgtcatcggcggcaagaaggacagcagcgccgacgcgaaacccaacacgtccaccagccagacgcagggcgacagcaactccaatggcggcagctccagcaacggcaactccgccggatccggcagcaacgatctgaacaaccttgacgacgcgttgcagaacggggccgacgacaccaacaacgatctcaacaacgacagcttcaacggatcctccagctccggcaagccgtcactggaagagttcgtcaactccagcgaaatccagtcgcagctcgacagcatgacctcgtcgtaccagggcatgggcatcagcatcaaggcgtacgcggaaggcaacacgctcgtgtacgactacacgctgtctgacacgtacagcagcatgggcgacatgatgacgtcgagccttgacgggatggacagcacgttcaagtcggtggcgcagacgctcaacgaaacctgcgacaccggcggcaacgccaaggtgcgcgtgtacctgcataccgaaagcggcaagacgctgttcgacaagagctacacggagtaagcgggtccagctcgcgagaatccgacaaggcgggacggccatgattggccgccccgcctttcgtatgcgcgttcttcgtaaggattgcactcgcattggtttacactggtgggtatgagaatcgcacgtttttcactcaacgacaagccgcgctatgccttcgtccagcaggacccggccgacggcaaggactacctgatcgaactggacggatacccgttcggagccgcgcccgtcaagcccacaggggagcggtacgcgctcgacgccgatgggctgaggctgctcgcgccggtgattccctccaaggtgtacggtctcgccaagaactacgaggcgcacgcgcagttcatgcacgagagcgggcactccgagattgctcacgcgccggaagacatggtgatcttctcgaagccttccacgtcggtgatcgggccggacgatccgatcgtcatcccgtcgtattcgaatgatatgaacttcgagcccgaagtggcggtgattatggggcgtatcgccaagaacgtgccggtcgagaaggccatggactacgtgctgggcttcacgtgcgtcaacgacgtgacgctgcgtgacctgcaggggctggatccgatgtggacgcgggcgaagggcttcgacacgtcctgccctctcggcccgtggattcagaccgagctggactggaaggacgcgaagatctccttcacgctcaacggcgaggacgtgccgatggcaagcggcaccactgcgaacctgattcacggcatccccgagcagatcgccgcgatttcctcgttctcgaccctgctgcccggtgacgtcatcatgaccggcaccccgaatgcctccggtcacctcgatcccggcgacgagcccatcgtccacgtagccggcatcggttccctccgcaacgtggtcgtgcgcggctaggcgacagcacagtgtgctgtcgcggcgcacgagccgggcgacagcgaggccggattgggtcggccgcaggccgtccgaaattgcgggaccgtgcgcggcattgcccgtagcctcgaccgggacgttgatgattggctcggggaatccataccgtttgagcggcaggcgcaagtgggtctcggccggggagtcggtgttctcgcgaatctgggtgagtgccctgatgcattgtttttgcccctggaacgagtcgcatgggtggatgaattttctgagttcggccagagtggtccgtctgcgtgcggggtcgcggcataccagcgagtcgccgaattctatgaggtctttgagggacagctctttggccatttgggcgaacagcgcctcgggggaggtgcataggagcccatgcacctcgatggttgcgcccgaggcgtccgtattgggccatacgcggggaatgatgtctttcgcgcgcgtccgccgcgtggttttgaacgtgacagtcgcggcggggcggttcttcgttgatctcaaacatgaccactctcaaaacccgcagatacgagaactgttttggcggaaaatggcggtttcgggtttcgtatctgcgagttttgagagcgtgtcgcacggattcgagttatccacattgcgttttggcgcttcaaaaacagcgcaaaacttgagtcgcttgcgctcaactttcgggaatagaatgggtgctgaatcggttgtgcatatcagacacagacggaaagcgctgtgcggggcggttcggatgtcgtgggccgcggccgccaaggcgcatgagacatacggaggttgatatggaacagaagttcaccaccatggcccaggaagtcatcggtgatgcgattcagagcgcgtctgccgcgggcaacgcgcaggtcgagacactgcacgtgatggatgcgctgctgcgtcaggaaaacggcgtgattcaggggctgattcaggcggcgggcggcagcccgcaggcgattggcgccgcggtgcgcaatgctctggtcaagatgccggcggcgagcgggtccaccacatcgcagccgcaggcgagccgccagctgacggcggcgctggcacaggccgagaaggagatgcagcagatgggcgacgagtacgtctccaccgagcacttgctcatcggcatcgccgcatccgcgccgaaccagagcgcggacatcctcaaggcgaacggcgtgacggccgcggcgctgcgcaaggccgtccccggcgtgcgcggcggtgccaaggtcaccagcccggacgctgagggcagctacaaggcgttggagaagtattccaccgatctgaccgcccgcgccaaggagggtaagctcgacccggtgatcgggcgtgatcaggagatccgccgtgtgatccagatcctgagccgccgcaccaagaacaacccggtgctgatcggcgagcccggcgtcggaaagaccgccgtcgtggagggcctcgcccagcgtatcgtggccggcgatgtgccgaccacgctgcagaacaagaagctcatcagcctcgatttggggtcgatggttgccggctcgaagtatcgtggcgagttcgaggagcgcctcaagagcgtgctcaacgaaatcaagaacgccgacggccagatcatcacgttcatcgacgagattcatacgatcgtcggcgctggcgcggccgaaggctcgatggatgccggcaacatgctcaagcccatgctggcgcgcggcgagcttcgcctgatcggcgcgaccacgctggacgagtaccgcgagaacatcgagaaggccccggcgcttgagcgtcgtttccagcaggtgttcgtgggcgagccgagcgtggaggacacgatcgcgattctgcgtggcctgaagcagcgttacgaggcgcaccacaaggtgacgatcggcgacgacgcgctggtcgccgccgcgacgctctcgaaccgctatatttccggccgtcagctgcccgacaaggccatcgatctggtcgatgaggcggcagcgcacctgcgcatggagctcgactcctccccggaggagatcgacgagctgcagcgcaaggtcacgcgctacgagatggaggagatgcagctcaagaaggccgaggatccggctagcaaggagcgcttggagaagctgcagaacgagctcgcgaacactcgcgagaagctgagcggcctcaaggcccgctgggatgcggagaaggccggccacaacaaggtcggcgacctgcgcgcccagctggacgccaagcgcgtcgaggctgacaagttcacccgtgagggcaacctggccgaggcgtcgaagatcctgtacggcgagattccggcgattcagaagcagctggacgcggccgagaaggccgatgcggaagagggtgcgacgggcgagaccaagcccgagccgatggtgcccgaccatgtggacgccgattcggtggccggcatcgtctccgagtggaccggcatccccgtcggtcgcctgatgcagggcgagaacgagaagctgctgagcatggaggactacctcggcaagcgtgtgatcggccagaaggaagcgatcgcggcggtgagcgacgcggtgcgtcgttcgcgcgccggcatcagcgacccgaaccgtccgaccggctcgttcctgttcctcggccccaccggcgtgggcaagaccgagctcgccaaggcgctcgccgacttcctgttcgacgacgagaaggccatggtccgcatcgatatgtcggagtacatggagaaggcgtctgtgagccgtctgatcggcgccgcgcccggctacatcggctatgaggaaggcggccagctgaccgaggccgtgcgccgtcgtccgtactcggtggtgctgttcgacgaagtcgagaaggctaaccccgaagtcttcgacgtgctgctgcaggtgctggacgacgggcgtctgaccgacggccaaggccggactgtggacttcaagaacacgatcctgatcatgacctcgaacctcggctcgcagttcctggtgaaccaggacatggacgcggacgccaagaagaaggccgtgatggacgcggtgcacatgaacttcaagccggagttcctgaaccgtctggacgagatcgtgatgttccatccgctgacccgtgaggagctgggcggcatcgtcaacatccaggtcgctcaggtggcctcgcgtctgacggatcgccgcatcaagctcgacgtcaccgacgcggctcgcgaatggctcgccaacaccggctatgacccggcgtacggcgctcgtccgttgcgccgtctggtgcagaccgaggtcggcgatcagctggcgcacatgctgctcgccggcaaggtacacgacggcgacaccgtgctcgtcgaccagaccggtggcgagcatctggaactcggtaccatgcccgaggatccggatgccggctccgatgccgacgtcacggtcgaagacgtcaccgaagacaagtgatggccgcataatggccgagtcgcgatgaggggaggccgggctcaatacccggtctcccctcaatgcgtcataagtgcgtcacgctgtgcgggtctcgtcacgcggcgcgcgctcgcacagcgtgacggttcgtgagaagccttatttttcaacgtttttggagtatgcgtcactctgtgcgctcgctctgcgtgacgtgacccgcacagcgtgacgctgcatggtgcgtgtgtaggcgctgtggtgcccggattcgcgcgtaagtccgaacgcgccgcggcccctattcgccgaccgcggcgcgctgctccacgaactcgcatccagctatcgcgcgggccatggcgtcgcgcatggtggacaggaacacgccgtcgcgcgtgaacgccagcgcctgcacttcgatgccgtacggcgaaaaaccggtgagcttgacgagtggttcgctgccgggttgcgcgaattcggcggtggccgtggccaccgcgcgcttcaccgcctccgtcacgtgcgccgggtcgctgccggccttcgcggtgaacgtcatcgtcacgcatccttcattggacggcgtgagcttctccagcgacgcggtgttgagcacggaattgggtatgaccatctcgttgccgttgcgctcgcgcaccaccgtctgccgccacgtgatgtccttgaccacgccggccgtccccgcgaccgacaccagatcgcccggctgtatcaccttgccgagcatcagcccgaagcccgagatcacgttcgccacggtgtctttcagacccagcgacacggcgatgccgccgacgccgagcgcggtcatcagtgttgtcgggctgatgccgaacaccggctgcagcacgatggacgcggccagtatccacaccagcacgcgcatgatgttgatgaatatcgacgcgctcggcatgtccgtccgatccagcaccttgcgcatcacccgtgccagtcccttggtgatcaacagcgcggcgacgatcgccaccagcaggaagatgattttcccggcgttcgcctcgaaccattgcagtatctgatccatgtcgcctccagggtcgcgtccgcgtcgcgcaccccgcggcggcgactgctctgcaagccactttagtgggcggttttgaaatctcccggaatgtcgcctttgaaaatgcggctccagtaggccagcatgttctccttcgacatcgacaggtacactcccatggcgagcacggcgacatcctcgttgagcaggtcgtcgaccgagagtttcttgctcagctccggccaccgccgcagcaccgcaaggataccgccgacggtgaagtcgagcatcaggtcggttttcagatccaggttgtcggcgtcgagctggaggtcgttgatgatcatcagacggccgaagtccttcagtgactcgatgagctcgggcgagctatggctgccggcgagcagtgccagacggtcgagccgctgccgctgaactgggtcgttcatcaccagggagcattggcgcctccattcgatgtcgggattgaggtcggcgcgtggcgcctgcacggtcgagtgctccacggcgtgcatgatcgccgaatcggccagctccggcaggctggcgtaatggtagtagaacgagttgcggttgacatgcgcctcgcgtacgacttcggtgacggtgatcttgcggtattcgtggtctgcgagcagctcccagaacgcgttttcgaggcgttcggtcgcggagagtatctcggaatccttgcgtgggcgcggcatgatggttcccttcctgcgtgacgtgcggctatcgtttattgggcactatgtctatatgtgtgatatggattattgtagggcggattgtgaggcggatgatcggaaaataggcgaactgtccatttttctcggttggcgaaacagagttcgggcacgagacggctaccgcgaggaacgggaccggaccgcggccatgagcagccccatcgcttcgatcagatgacggcgatccgcctccgacagacccacgaacgtgttgatcatcgtgggaacggccttcaggccggctgccatgagatcggaaatgctgtcggcatggctcgaccgcagcacggagaacagggcgtccaccgcgcgctcgcggtcctcggtgctcagcgattccagccagccgttcaacgaccggttgaacagctgggaactcggcgacacctgcggcagatattcgaaatcattgcccgagacctgccaggagaacgtcagatgctgcatcacgcccttctggtcggagcgtacaacccgcatcggctcgggcgtctccagaatcatgccgacaatcgaggagtccggtacgatcttcacgatgaggggcatgacgctccgatacggatcgctgccgacgatctgcgacgggaaccccggcccgtccagcgaatacaccgccgtgacacgccgctgcaccggctcgggcgcgttcatcgccgcatacacggccagattgccgcccttggaatgccccagcagcaccatcgggccgcgccacaggcgcgccacggcgcacacatactcacacgccgcatgctgtgcgggcaccgggtagcgaaacgccatgttgaaatcctctttccaacccacgaacgagtcgtccgtgccgcggaacgccaccgccagcgtgccgcccggcagcagcatggtcacggcggcgaactgcatctgctgttcctcgctgaaatgctcgtcggatgcgtccacgcgaacgcaggcaaagcgcggattgactccgatggcggcgtacagctcctgcgtcaggcgcgggtcggcgaggccattatggccgctctccacatgaaaatcatcgggggtcagcgcctccgacaccgaagccagcgttgcgtcgccgaactccggggcggccaaatggcgaatcgagcgcaccggatggcgcacgtcgatgctgctcagacgtctgcggaatgtgccggatcgtgcctcgacagcggccagagtccgcacgcatgccggcatgtcctgatagacgagcgacgccagcaccagcgcgtcgacggcgttgaacggtgcgtcgacgccgaacgggcgggtctcggaacgtgcataatcgatgatgttgggcgtcgtgcgcctcctttccgccgcggcggggctatgcttgtcgtccggagccgctaagggccgggcgggtgaccggttacccgtcaatatacccggttcccaacccgcgcgaacccaacaacaaccggcgacatgccctgttgtgcgtggtcggtggtaaaaacgaaaccagagtccaacggggaggttgtgccatgatcaacgaaacatacaaagccatgctcggcggcaaatcggtcattcgaaccctgagtgaatacgcgaccgcaaggggcaccgaaatcggatacgacaacgtgttcgactattcgctgggcaacccgagcgtgccgtgcccgtccagcttcaccaaggcgatgatcgacatgtacgagaccgccgatccggtcgcgctccacggatacagcccgtcgctgggcaacccggaggcgtgccgcaccatcgccgaaagcctcaaccggcgtttcggcatggattacacggccggccacatcttcccgacgacgggtgccgccggtgcgctcgcccacgcgctgcgggccgtcaccaagcccggcgacgaagtgctcacgttcgcgccatacttccccgaataccatccgtatgtcgaaggcgcgggcgcgcggctgaccgtcgtgcccgccgacatcgagagcttccagatcaacttcgcggcgttcgaggcggcgctgaaccccgaggtggcggtcgtgctcatcaacacgccgaacaatccctccggcgcggtgtattcggccgaaacgctcgaccggctcgcgggtatcctgcgggcgaagcaggctgaatacggtcacgacatcttcctgatcagcgacgagccctaccgcgagatcgtgttcgacggcggcacgcagccgtatccggccaagttctacgacaacacgctgacctgctactcctggtcgaagtcgctgagcctgccgggcgagcgcatcggctacgtggcagtcaacccgcgggcgaccgacgccgaactcatcgtgccgatgtgcgggcagatctcgcgcggcaccggccacaactgcccgagctccagcatgcagctcgccgtggcgaagatcatcgacgagaccagcgacctgagcgtgtacgagacgaacatgaacctgctgtacgatgcgctgacctcgatcggcttcgacgtggtgcgcccgggcggaacgttctacatcttcccgaaggcgctggaagccgacgcgaacgccttctgcatgaaggccaaggaatacgacctgatcctggtgccgtccgacagcttcggcgtgtccgggtacttccgcatggcctactgcatcgacaccgacaaggtgaagcggtcgattccggtgctggagcgcttcgcgcgcgaggaatacggattgtaggcgaaaccgcgctctcaaaactcgcagatacagccccagaatgtcgattctggggctgtatctgcgagttttgagagcgcgttccgtctaagagcatccagaaagcatccagaaaacattcgaaaaccgttccgcaaggttgcaggacggttcaacgtcaggcgtaggggccgctaggaaagccgtcgttcaatggagtcaatccaaggaaaggacgacgaccacgaaaccccatgacatgcaaccccatgcgagccccggcggctcacggctgcgtcgatcgccggtaatcgcgacgaggcggatggtcgccctcacgggtggcctgtgcgcgggcgccggcggcatggtgctgattcggcacctctcggccggttccgctggctccgcctcaaccatgcagccgccgagcggcaacttcggtggctgcgccaacaccatgcaatacgactattccggcaccaactcggtgtcgctcaccgtcggcgaagactccaccaccgtcatcgacggtaccgacatcaccgcctccagctccgggtcgaacggcgtcttcgccaccgattccggaacggcgctcgtcaacgacacatcgattgagaccatggccgacaattcacgcgggctggacgcgacctacggcggcacgatattggcgaacaagatcaccgcggacacgcagggcggccacagcgccatcgtcgccaccgatcgaggcggcggatcgatctctctcgccgatgtgacgctgagcaccgccggctccggctccccgctgctgtattccaccggcgacattcaggtgaacaacgtctccggaacctcatccggcagccagatcgccggcatggaaggcctcaacacgatcccgatcaaggattcgacgttggaaagcacggtcaccggcaaaaccgcatccgacccgatcgccaatggcaccatcatctaccagtccacctcgggcggcgtgaccgccgacacgatttccagtgtggacctgtacctgctggacggcgccgcatggatcggcgcggcgacgctcacggacaacgcggcggccggctccggcacgggcacggcgagcgacgccaccatcactgtgaatgtcgacggcacgtccacgtgggtggtgacgaaggatacgaccatttccgcgctcaacgtcgcttccggcggcggcgacggcaacaccgtcaccatcgtggcgaacggcaagaccgtggtctccggcagcggcgacgtgaccgtcacggtgaccggctcgtattcgacctcggtctcggccgggagcgacacggagctgtcgagcgacaccatcgaccgcagcgagttcgacagccggttcggcacatcgacagcgtggacgatggcataaccatggcggcgtgccagacatcaacatcagcaatcacttcatcagtcagttttcaaaggagtcatcatgaccagcaacaacagcaacaatgtcaacaatgcgaatggcggcgagagcggcaacggcgcggatggtgccatcgagggcgtcgctatcgaggcggcggcgaacgtcaccggttcggagcagcgtcaagcggctgtgaatgacgccgctgtggctgatgtttcggtgactaacggttcggcgggcggctggggcgtggagcccggttccgcggctggtcgggccgatggtggccgggctgcggcagacaacggcggtacagacgagtatgcggggaatcgtgcggctggtctgggagacgccgaatgggctgccgggaccggggctgctggatgcggaaccgccggatacggctcggctgggtataggctcgcggcggctccgggcagttccggctatgcgccgaacggtccgatgccggggagctacggcgagggatcgcgtgcggtgtggtacgcgcagaatgcgccgacgcaggcaatgaatccgcagccggagaatatgcaagcggtgagtggccagaacatgaacgcgcaggacgcgaatatgcagggcgcgaatacaccagatgcgaacgcgcagggcggccggatgccgttgtatgcggattggaacggccgggggccggtgcctggagcaatgggcggtcaggtcccgacaccgaaaggctcgaagggcggcgaacacgcgttgagcggtaagacgtgggcattgctcgccgtggtgtctctggtctgtggcctcgtgggcggcgtcggtggagcgctcgcggtgaacgcgctgaccgacgacgaagatggcacaggcagcagccagcagatgcagatgcccggaggcatgggacagccgcccagcggaggccaattcggcaatggacagtctcagcagtatggcggctcagggaagtcggacagccagctcggcagtggttccagtggctccggcagcagctccagcggttccggttcctcgtacagctccgacggcagtgatgtgaccacaatgtaagccatgagccgggcaaggctcagcgcgaagtgaaagcgtccaaccgcaatcgcgtccaaccgcaatcgctgccccccccctatctgcccccatcatcctcgtcaaattacgggttgaaatagccgttctgggcaattccccgtgcgaaatcgccgttttgagctcgaaaaacggcgatttcacacggggaattgcggatttcggctatttcaacccgtattttcgcgttctgttcgccctccacagcccgtaaatggcccagccggtcgggctttacggctcatccggccagcgcatcgctgacgaatcggtcgaccgtcgaccaatgccgttccgggtcggtgctggcgctcatggcgtgaccggcaccggggaccacgagccgttccttgcgctcgctggagcatgcggcgacattgcgatccagctgccggggatcaacgaacgcatcatccgtgccgtggatgaacagcatcggcacggtggcatgcgcgagctgtgccacgctggaggcctgccggaacccgtaaccggccttccgccgggagaacaggctcatgccggccagcgcgggcatcgccatccaccgctgcggcaggtgatacatcgacaccgtgttgtcggcgaactgatcccacaccgacgcgaaaccgcaatcctcgatcgccgcgcacacgttgcccggcagtcatcatcacttcggtggcgcccatcgacacgccgtgcagcactatcctcgcgtgagggtcggcctgcacgatcagcgaaatccagcgcatgaggtcgcgccggtcaagccatcccatgccgatataacggccctcgctcagctcgtgcccgcgggccgccggtgtatccgtggcagaagatcgcatatcggtgcgccggcgatagcggcagtagggaacggctccgttcatggataacgctggcgcgggttgcatgcatgttcgcgctgatgctgtctgcatcggcgacagccgcaccgacggcgttcggtttggcgacgcgcggcccgggcgtaccagtgccgccactgctctcgtccccgtcggcgatatcgcgcgcatcgccaatgccgggttcatccacagccgcactgccactgccagtgccgccgctcacgctgcttccggtggcctcgcccgtcgccgtgccggttgcatcgttctcgcgcgtgccgcgcgcggccggcatcatccagccgtgcagccgcagaccatcctcactgcggacctccacgggctccttgacccgctcgaaccagcgcgcggcccttgcctcctcggctgcatcacggcgcacgccctccagcttggcgccgggaatcttaccggccctgaccagtttcatcatcgaaagcggcgcctgcgtgtcaaggacgaatcggaacatgaacgccgacgtggccagcgtcaacgcgcctgcggatgccgcggcgatgccggtgattcggcatccgcgccgtacccggccggcgcgtcgcgagcgaaatgagtcatgccgatgcgcgaaagcagccggcgcaaacgcagtgcagcttcccctgcggataccctgtgccgactggattccaagccggctgcacggcccaagcgcggccggcatgcccgggaagagcgcgaaaggcgaaaaaacctcacgacctctagcgaaccgcgcgaacggttgttagtgttgatgcacagacgatttcggttgccgcggcaggcgcgccgaacgccgcatatgccgcttggtgcgcaccagacgtagagcggcggtctccaagaccgcaggtcgttggttcgaagccaaccgcgtatgccagtcacttgttttttcggggtctgcctccgccgacgccccgaccgggacgcttcgcgttccatccgtctatcgtctccgggagccagccgcgcgtgcggcctatcatggcgtcgggttcggggagcttgaggttgagcaggccgccactggttatgccgaggcgttcggcgacctgcttgacgccgagagatatgcagtccgagaacacgcgacacgcagtgaatcttaacgaccgcaggactaggcaaacaataaatggcactacgtggatgctcatacacccactgccacctgcccgtcacccgcggccaagcacgggacctcggacataacgaccggcgcgacggatacaacggacccgaacacgcgagctgcaaccgcaaagcgggagcagccaacagcaaccgcatgcgcgaacactggaacaagcaaacaggaaacaacgtggcgactgcaggccgggtgagcctacttcttcttcggcacgtagatcacagtgtcgatcagttctcggtagtgcgcgacgatctgcgcgcggcgggtcttcaggctggccgtcagcatgccgttgtcttgtgtgaactcgtcgggcagaatctcgaacttgcggatcgactcggcgcgagacacgccctcattggcctgattcaccgcacgctcgacttcggtgtgcacgatcggattgcgggccagcgacgccaggtcggactcctcctgagcgccctgcgatttcagccacgcgttcgcatcggcgagatccaacgtgaccagcgcggccacgaacggcttccggtcgccgatgaccaggcactggttcacaaccggcgatgtcatcacggcggcctccaacaggccgggggagacgttcttgccgccggcggtgatgatcagatccttcttgcggccggtgatcgaaatgaagccgtcctcgtcaatgtcgcccagatcgccggtgtgcagccagccgtcgacgatctgctcggcggtcacatcgggatggttgtggtatccgcggcagaccagatggccgcgtacgcacagttcgccgtcgtccgcgatacccgcggtgacgccgctcatcggcatgccgatcgtgccgatccgattgttctccggcaggctcacgcacaccggcccgcaggtctccgtcatgccgtagccctcaagcagcggcatgccgatgccgttgaagaagtgcgaaaggttggcatccatcggggcgccgccggtgatggcgaagtcggcgttcgggctgaaaatcgtgcggatcttcttgtacaccaccagctcgtagaacccgtgggcgaggcgcccccgccacggcagtttctcgccggcctgctcggccttcgaccaatcccgcgccacgttcgccgcacgcaggaacatcttgccggcgatgcccttgccggcgcgctgcgacgctgcgttatacaccttctcgaacacgcgaggcaccgccagcagcagcgtcgggccgaacgactcgaaatccttgacgatcgtcttcatgtcggaactcagtcccaacgtcagcgtgccgcagaagctcagcagctccatgaaccgcgcgaacacgtggctcagcggcaggaacagcagcagacggcggtcgggccacgcgcaggcgcggggcatgtactgcatggccgacaggcacaggaacgccagattgcggtgcgacagctccacgcccttgggggtgccggtggagccggacgtgtagacgatcgtcgcgaggtcgtcgccgtgggcgtcgttcttgcgcgcccagaactcctcgtcgctcacttccttgccatacgcctgcaaggcttcgagcgcgccggcctcgatcacgaacaccttgcgcagcgactgcacctcatcgtggatggattcgatcttgtcgcgctgcccgtcgtcctcggcgaacgcgatcgtggcctgcgaatcgttgaagatccagctcacctgagcgtcggaattcgtctcgtagaccgggacggtgagcgccccgaccgccatgatggccatgtcgagcgcggtccattcccagcgcgtacgcgacacgattgacacggcgtcgcccttcttcacacccaagccgatcaggcccttgcccagggcgatcaccaggtcgcggaactgcgtcgcggagaacgacttccagccgccgtccgccttgtattcgacggccgagccgtccgggtcgcgctgggcgcggcggtcaaggaaatcaaacaggttgatatcgtcgtcgatcggttccttcagcggattggtgaactctttgaccatggtcgaggaatttactgtcatactctcttgaatactctcagcgcagtacaaaaaccgcgcgacaggcggcatttgggggtggaggggtcggggagggacaccgagcatgcggcgcgatgatgtcgtattatgtgcgtcgcgcgtggccggggctgtgcgatggaggcaggtttgccggtatcgcgccttcggtggcgcggcgcggtgattcgtggccgatgaaggtgacgggcggaataggcgaggtgcgggcgagatgcaggcgagcggcatgagccggagcgaagcggcccgagccggacgggagcaatcatgaacatgccgccgggctggtatccggacccatcgggcgatccctcgctgatgcgttggtgggatggcgaggaatggactggtgatttcgcgccggcgcagcaggtgacgccggacggcaaccgtattcgccgggcgcgtacccgatgacgaatggcgaccgcaacctgcgtctcgctgcattcatcctcaacatcatctcgatggtcgcgttgggatggacgttgctcccgctggcatggatgagcccgatgacggtgatgagttggggcatctacaagggcacgcgggccaacaccgtggcgttcggtgtgtgcaacctgctgttcatgaatgccatttttttttgggggggggctgctcatcagcaacaaagagcggtgaccgattccgcggaatttcaggcgtgtcgcgatttttgtcccgtttgtacaggcggtcgggtaatgtattcccctgttgcctgtcaaggtgacattgcggacatagcttagttggtaaagcgcaaccttgccaaggttgagaccgcgggtccgagtcccgttgtccgctcgcagattcggctggctgaagcgattcggccggtcggcacgcagacccgggcggttggcgcagaggtagcgcacttccctgacacggaaggggtcacaagttcgaatcttgtatcgcccacggatgccgaagttcacttcggtgtgcactgggtgattggcgcagcggctagcgcacttccttcacacggaaggggtcgtaggttcgattcctacatcacccacggccgctacggtggtcggttttcggggctatggcgcagctggtagcgcatctccatggcatggagagggtcaggggttcgaatccccttagctccacagaacagaacgcccctccttccgggaggggtgtctctttttttcgagcctataatcgcaggcgaggatcctcggcatcgacagctccccggacatgatcgcctcggcgcgcaagctccacctcgactgcgatttcgatgtgctggacgtcgggtcgctcgacgagctcgacaccgatttcgatgtagtcttctccaacgcctgcctgcaatgggtgccgaatcatgaacgggtgctgccctccatgctgcggcggcttaacgtcggcgcaattcaccgagaacatcaacctgccgccgcacatcatcatgcgcgagaccgcgtgcgagccgaaatggcggcagtggatcagcgagatacgccgctactacaatctcggcggcgacaatttcgacgtaagcgcatactatgatctgctcgccccgctctccgcgcacgtcgacgtgtgggagacgaactactaccatgcgctgcctgggtatgaggcgatcctcgactggtatcgcggtaccggtctgcgcccgtatctggcccagctgcccgatgacggcctgtatctgcgagttttgagagcgtcggttgagcgagccatagatttttcatatgtccgcggtcttgtgtcgcgccctgcgacgtgcttcgatggtgggtgccggcggcaaggggcttcgccggtgccatatcaatggttcgcgcgtcaagaagggggttgtgatggtgtccaccacattggacttcgccgagaagtacctgctgaaaaccgaggtcaggaccgtcgcggtcatgcccgacgacgatgattcggtgcgtgatgatgattcgtacgacgcatagtgcggtgatcgttctcgatgatgtttgtgcgaggatgactcatattcccgcacaagtgcgcatgatgcggattcccggaatcccgagacttgctttcgcttgatgcccgattggcccggtaccatactcgcgcctgtatcattgagggcgattcgttgcatatcttgccaccgggaagggtcatcatggggcgcagtcggtgatgcatttccacgtgcacttaatcccgcgcagatatggggacggattggacacctggccaagctgccgggccgctcgctcgacctcgatacggcatggcggcggttgaggcggggaaaatcgacttcgtgaggattgtgatataggacatcaaaacggcgggattccgccgatgcaacctgtggttgcgcacggttgcggggcatggtcggcgattgcaaccgtaagatggtggcggatggcgtggacggcgtgccatagtggggtcatcggccgaacatgacatgatggaatcacttgagaagggatttgacgatgagcttccgcaccaacctgcaatacctgcgcgcccaacgcaacatgacccaggagcgactggccatgctgctcggcgtctcgcggcaggccatttcgaaatgggaatccgagaaggcctaccccgaaatggacaagctgctcatgatctgcgatctgttcggctgcacgcttgacgacctcgtgctcggcgacgtgagcgtgagcgccagccggccggactcgcacggcgcatcggcaaccggccgcggcacgactgtcggaggcatgaccggtgaagatgccgggagccctgcacatgcggggaacgcgaagggaagtataggcgacgccgacgagcccgcgcatctcggtgcggccggtgccatcgagccaagcctcacgggcgtgccgaccggcgagacaccgtacggaaccggttcgccccgccccgccgtgcacgccaatacggccaccctgccgcaggacctgaccggctacgacgagcatcgccgccggttcgcgctgctcatctccggcggcgttgcggcgatcatcgcggcggtcggtatctgcaatctgtttgattcaagcaactccatcctcggcgtgacgcggctcaatgacttcctcacgttcctgtgcatctgcataggtgtgatcgccgggctggcgatgctggtcccgggcggcatgtcgcacgccgagttcaaacgccgccatccgtatatcgaggatttctacaccgatgaggatcgcagccgcgagacgcgcctgctggtgatcggcatcgtgggcggtatagcggcaatcctgatcggcatagcgttgactgtgtacgccgatgacgtgttgggcatcagcgatggatggccgaacgcgatcatgctgatgctgtgctcggtcgccgtcttcggtttcgtttactgcggaatacggcacggcatgctcgacatcgacggctacaacaaggaggccgataccgatggcaagaaagagcgtgcagccgggcatgatttctacgacaatctgaccggtacggtatgcggcatcatcatgtcgctggccacgataaccgccctgtgcctactgtttctggggccgtggatgctgcatgacgactggagcttcgtgggatccggcccgttctggctgccgtggccgatcggcggcgtgctgtgcggcatagcgagcctcatcatccagctggtcaaggattatcgcaggcgcaacgacgacggacaaggcgccgggcagcccgggcggacgaaatagcaaggaaaggacggccgatggacgatcccgccgcgtttcgtgagcggtatccgttgcaaaccatgcgattgccggatggcgaacccttcgcataccggtatcatcgcaatccctccgcccgcgcaacgattgtgctcctgccgggcggaatcgggctgtccgactgttctgcctgcattttgaacggttcgccgaggactgctcggtcatcaccttcgattatcaggagcggttcgcgacgaacgccgaactggcgcgtgccatcgcaagtggaagcggacgcttcgcctgataccgatgccgctgcaccggcgtctgatggcgtgggccgtgatgcgcaagatgcaagacctgtcgtctggcgaacggcggctgatgcagggcctgtgcgatgtcctcaagcagttgctgagcaagccgtatcagcggcatatggccgatttgctgatcgatgctgcgtcgcacgccgacatggtgacggcggatttcgcgcggtgggccggccgcgtgctgctcatcctccgaagacgaccacaccttcaatcaggcgaacaaggacgcgctggtacgcctgatgccggatccgaccgtcgtcaccgatctcaccggcggtcatctcgcgctgttggtgcgcatggacgagtacatggataccgtacgcgccttcatcgggtcgcatgcggcccgctcttagcaggtgtctctagtctcgcgtcggatccttctgcagaagcaggaacacgagcgccacgaccagcagcaccgcgatggacagcacgccgagcgaggctcgtggtctgcgacgcatgagtgtgaccgtgagctccccagctgatgagcgcaaaggcagagattggtttcacatgggattgtcccgatgtcaaggtcatgatgcaaaagcgttaagcatcctacggattatattgagaaaagaagtcattagtaatacaattggctttggaaaggattcattatgagcactaccactgttcgcatggatgatgatctcaaagccgaagtgaacgccattcttgattccatgggattgaatttcaatacgttcgtgaatatggccagcgtgcagttggtgtcgcagcgtcgtattccgttcgaggtgaaggcgcctgaacccgtgctgcctcacgcgggacatgttgccgccaatggggttacgtaccgtggggtcgacgaacaggggtatccggtggtcgaagtgccgaacgccatggtgttgaatccaagccggggcgccgacggtgttgccgtactgcccaaggcgtggcgtgatggcgaataatcatgatattccggaattgatgccggttccgaagcaattgcatgtcttcgacgtgtatcgcatgcgggtgcggttcgaggatgatccgacgaaatcacgcagccattacgtggccgccatcgtcatacaagccgacgacgacggtggagtggctgtgaaactgaccagcaatccaacctggcatggggcgggcgatgtgcaactgcccgagtatgagcatgccgggcttacccatctgacgaccgctcgctgcgcgcagctggtgcggttcctccggtcggatctacaggggttcaccggtagattgagtcggaatgatgccatgcgtgtggccaatgtggtcggcgaggtaaagcctgaagaacaggtgtggctgtaattctgttctgccgtctaactggttcggggtattcactgtgaaccagtgcacaattgcgatggtcgatgtctttctacagtccgcttatatgtgaaggttttgtggtcgacgttgcgtcatatgttgcttgtgacgttgcgtaatgcggcatattgcttggtgaaaggaggttgggccatgtcgatggacgatgaaacggacagccgatacaccacaggggacatcgccaaactcactggtgtgagtgtgcgaaccgtgcagtactacgacgccaaaggtctgttgattcccaatgagatcagcgacggcggccgaaggctgtatgggactgcagaggtcgagcggatgcgggtcatcctttttctcaaaggactcggcttcaagctagagcagattcgctcgattctgtcggacgagcggccggaacgggtgctggttgatttgctggatcagcagacggcatccttgcagtcgggtatcgccgagcagaagcaacgtcttgatgactgcttgcagctgcgcaaagcactgacggtctcggcgtctgacttcgtatcgtcaacattaaccgacatggcaaccgttatgaacaccacaaccactcattccctgcgcaccacatatttggtcatgctggcaatcacattgcccgcgactttgttgcaaattgcatgcctcgtcattggtgtgatgacagacgtatggtggccgctgccggtcgccgttctgctggcgattgcgctcactgttgcggcgatgaagtactatcgctcccgcgtgcagtacctatgtccggcttgccatgagaccttccagccgggtatgcgagagttcgtattcgccgcacacacgcccaagacacgcaagcttacctgcccgcattgcggtcacagggggtactgcatggaactcagcatctgaaagtttctgattataacgttcgatttaccaacggtagttgtcgcagaatttgcgacaactaccaccctgtcaaaatatgtgcgttgtgcagggctaaactgtttcaggtcgcggctcgggcggtagggtctgccgttttatcgctgcttcggcgttcctgttgctgattgatgggtgatattacgcttgcgttgggtccttctgcaggagcaggaagatgagcgccaacaccagcaggatggcgatggaaagcacgccgagggaggcgttgccggtaatcgacgtggtggtggccacgaggaacgtgcccagaatgctcgcggtcttgccgaagatgtcgtagaaaccgtagtactcgttggcgtggtccttggggatgatcttgccgtaatacgagcggctcagcgcttggatgccgccctggaacatgccgacgaggatcgccaggatccagaactgcgcggccgacacgaggaagaacgcggcgaagaacacgatgcacatgtaggccacgaccgccgccgcgatcatcgccttgcagccgaaccgcccggccatccgcccgtacaggatcgcgcatgggaacgccacgaactgcgtgaccagcagcgccaccaccagctgagtcgagtcgatgcccagctcggcgccgtacgaggtgctcatcgagatcaccgtgttcaccgcatcgatgtagaagaagaacgcgagcatgaacatccacagcggcttgttcctcactatcttgcggaaggtgccgccaagctcgcggaaggtgccgcgcacggccgttcccagctggtcgcgtgtggcgcggtaatgctcctgacggtagctggagatcagcgggatcgtgaacgcgacccaccagacggcggtgatgatgaacgatgcgcgggtgcagccggtcgtcgtccagccgaatggcagcgccgggccgccgaagatcaacgcgatgcacacgatgaacggcacggtcgagccgatgtagccccagccgtagccgtgcgaggagaccttgtccatgcgttcgttcggcgtggtgtcgatcagcatcgaatcgtagaacgtgagcgagccgttgagtccgatcgtcgcgaggatatacacgaccaggaacggcagccacgtcagtggaagcgccatcgcgcagcacgtgacgacgccggtgccgaagaagccgaggaagaacttgattttcatgccctgcacgtcggcaatcgagccgagcagcggcatgagcagcgcgatgaccagcgatgcgatggtctgcgcgtagccccaggccgacacgatgttgccgtccgcgggcatcagcgatttcgcgtagatcggaatcaccgcggtggacagcagcacgaacgcggagttgcccacgtcgtagatgatccatttcttctcgcgcggggtgagtttcgcggtggcggtgagggccggatctgtgccggccgctgtactgtctgctgggccatcggcgggtttggctgcgatgctgtcgttcatggggactcctgacgtcgtgttcatatatatcgtaaagtgccgtttccggcataccaagtttccatatgaattgcgggtgaattgttgcgggccggcgggggttggacgggtcaggcgcgcaatgggccgcgtcgatcgtggcgatcgtcatcggggtcggcgttcgttatctggtacacctattatgcgcggcgcaagcccgatcccatcgaagaggcgcggcgggcggatatgttcgctcgcggttggatgccgctggacgaggacgtgcacttccctccggcgtggttcgccaagatttccaagctgaggacggtcggtagcgaaatgccgcatacgacatggggcaaggacggctgaatcacgttcaactatgacgtgatgcagttcatatcggacgcgaaccccagctatggcaccgatatcgtgttcctggtatgcccgtgcacggtgccacgaggcccactcatgtgggcgaccatctatcagggtcgcaagatgtttcagcgcgccagcgagcagggcggcatgcccgccgacgtggtcgaactgctgaagatgagcccgtacagaccgaatctgatcgtgatggatggacgaatctacatatggttgcgggtgaattacatgccgttgccgcagcgtttttctgaattatccgctggaaagcgatctgattccgttgacgaaggaactgcatcgcaggctcgcccgcgatatggggattgtcggccagacgccgtgggctggccgcgcctgagcggtcattggtacgatgattggtccaatagcgtccttaagtgcgcgccgaaacgacaagtgcgcgcacatagggacgcaaaacacccgatttgcgtccctatgtgcgcagagtcgtccgttcggcgcgcacttaaggacgcaaacggaacgacagcgttgcgcaacaatccatatcggccgggcgacgctgaggggaatggctacttcgcggcctcggccggagtctcgtcttcctcgagcttggcgatgacctcgtcatagccggggcagtccggaacgccgttgatggaacgctgaatgcccagcgaagcggccgcgttggcgatcttcaccgcatcgacaagcgaccagccgcgggcgatcagtgcgcacatggcaccggtgtggcacgagcccgccgaacgggtgtgcgtcgccttcgtcggatacccctccacatggatgacttcgccgcccggcgtgcgcacccacgcgccgcgcgaccccgcacgaaccaccagcggcgcgcgcagcgtggcgccgaggctgttgcacagcgccttcatcgagtcgtcgaatccgccgccgacggtcatcgacagggaatcgtccacgaacacgccaagccggtcggcgagcgtgcgggcctcctgacggttgcaggaccagatgggctgcaccagcaccagatcctccagcaggtggtcgctgaccatgtgcagcgtgttggtcggattgagtacgatgctgtagtcgcgcgtcgtcgggtccgaagcggtgcgatgcaggaaggcgtcgatgcctgacgcgctgtgatccatcagcgtgttggcgctgatgtgcaccacatcgccctcgccgggctccacgcagtcgaacgtgttctcgttgccttgcgattcggcgccatacgtggcgacgaacgtcttgcgctcgctgtcgttgagcaccagacggaaaccggaatcggcgtcgatgcgatcctggccgatgtgctcgatgccgttgtcgttgagagccttgcggatcagtgacgcccacggcccgttgccgatgacgcctgcgtgcttggtcgccgccccaatccggctggccgcctgcatgacgcggaagctgccgcccaccgacggcatggtatggttcgcgacggcgaatccgcccggttggggaatcgcgtcgatgtccatcatgatgtcgacccacacctgtcccaacgagatcactgtgggggagggcacgtcgtttttgcgtgaaagcaggcctttaagtgaattgagcatcattcctccttgacgattgccgcgttgcatgtatcgtatgccatacagtaaccattttaccgtgattttatgaagagttgctggatgcggcaatagtcaagacgggtgatattgcgtggatgtgtaggtgaaagccgcaatgatacacgcttgatttgcatttgtttgtatttggcgctattattgtgaagttgtgtgttcaagcatccgtgctggaacacggaagacttgaacatcaaggttattaagggagtccatcatggcagctcgttgtgcagtgtgcggcaagggtccgcaggtcggatacaccgtttctcactcgcatatccgcaacaagcgcaccttccgcccgaacctgcagccggttcgtaccaccgttgacggccagaacgttcgcgtccgcgtgtgcgtcaagtgcctcaaggccggcaaggttcagcgtgtggttgcgtgacatcgcgcgataacgtttcactgaggccccggaagtcgcaagactccggggcctctttatatccgctggcggaggggacaatgcgatgccgtcccgccggcacaccacaatagggacgtatgagcatcacgttgaacaccaccatgtcgtcgatcatgacgaacaagcggcgtgtcggcgcgctcaaaagccttggcgtcgtgacggtgggcgatgcgttgacctactatccgttccgcgtcgccgatccggtgcccctgcgggcactgcgcgaggcccgtatcggcgagagaatggcgttctccgcgtcggtgcgcggcatgcgggtcgtgccgatgaacgttcggcggggctaccggctcgaggccgtggtggatgacggggatttcgcggtttcccggcatgtcgcgggggccgccgcccgtttggtgttcttctcgtacaagaagcagtatgtcgattggctgagcatgcggctgcgttccggcgcgattgtggtgatcgccggcgagccgagcgagttcaacggtcaactgcagttcacccatcccgaaataatgacggtcgctcccggctccggtccggctgatggcgaatactccggtgtcgtgcagatgagcgctctgaaatacgacgccgacaccgtcgaagcgggcctgcgtcgcatcagcagaccccgaccggtgtatcacgcgtcgtctcgtatctccagcgaacacattcatgagtcgatagtgcaatgcatcgagttgctggctggaaccgggcaggatctcccgggcgatgcggcaacggaagccccgcaaacaatgaaaccgatggaagacggcggcatcagcggcgccggaaccgctccagcgggtgccgagtctcggtcaggaaacgccgtggccgtcggcctggcccgcgcgatcccggacgtcctgcccgaatcggtgcgcgaatcgaatcatctgctgcatcgcgcggaagcgttcctggccatccacgacccgctcagcaccgcggatttcaaacgggccatcggcacgatgcgctacgaggaggcgttcgtctcgcagacggcgctgctccagtcgcgtagcaatgtccgcaaggatgcggccctgccttgtgcgggcgtggcgctgcgtgaccggttcatcgaatcactgccgttcccgctgaccggcggccagcgggaggtcatcgatgatatcggcgtggacatggcccgcgaatatccgatgcagcgcctgctgcagggcgaggtcggttccggcaagaccgtggtcgcggtcgcggccatgctgcaggcggcgggttccggccatcaggcggtgcttgtcgcgcccactcaggtgctcgccgagcagcatcatgcgaccatcagcgccatgctctgcgcgattgacggcgtcgagacgtgcgatgacccgtcccgcgataccctgtctcccaatgacccggccgacctgatcaaggccgccgaatccgctgccgatgacggagatgccaaggggcgcgcggccgtgaaacatcccgtgaaacacagtggggcacgcagcgggaaacaagacggcgcggcgcacgcgcagtcggacgcgaacacgcggcacgtgccggtcatcctgctgaccggcggcatgaaactggccgcccgccgccgtgctctcgcgctcgcggccagcggcgacccgtgcatcatcgtcgccacgcacgccgcgttctccaagacgttccaggtcccgaacctcgcgctcgtcgtcatcgacgagcaacaccggttcggcgtggagcagcgcgaatccctgcgcaccaaaaacgatgtcgtgccgcacctgctggtcatgaccgcgacgccgatcccgcgtacggcggcgatgacctggttcggcgatctggacatctcgtggctcaccgagctgccgggtgggcgcaagcccatccgcacgttcatcgtgcctgaagacgacggccgcatgatgggctccatgttcgcccacatccgcggccgcatcgacgcgggggagcgggcgtatgtcgtctgcccgcgtatcgatgccgacgatgaatcggacggcgatgacgatacaagtggggcatcgcagatcggcgtgtacgacgattccgacgcctacaggcgcgaatccgccaccgcggccgccaacacatccgccagcgcgccatcgcaggaggatggtgacggtgctccgtcacggccgccgctgcattccgtggccgagatcgagcgcaggctgtcatcgctgccgcagttccgtggcatccgtttcgcgacgctgaccggccgcgacgatgacgcgaccaagcagcaggtcatggccgatttcgcggatggggccacgccggttctggtggcgacaacggtcatcgaagtgggcgtggacgtgccgcaggccagctgcatcgtgatcttcgacgctgaccggtacgggctttcgcagctgcaccagctgcgcgggcgcgtggggcgcggcggcacggattcatgggcgttcctgatttcgcgggctgaggacggcggtcccgcgcagcagcggctgcaggtcatccagggcacgctcgacggcgcccagatcgcgcaggccgatctggagttccgcggcgccggagacgtgctcggcgatgcgcagtcgggcggcaagtccggtctgaaactgctgcgcgtggtcaaggacgccaagatcatcgccgacgcgcgcgaacgtgcggggcggttgctcgccgatgaccccgatctgtcgggcgaggtcgagcttgccggcgcggtgcttgatttcacccgcggcaacgagacgttcctgaccagcagctgacgcgcgacgggagatatgcgccgcggatagggtcgttggacacgagccccggccccgccatccgcgatcgaacaatgtggcgcttgaacacagtatagatttttcatatgggaacggcgttctcatcgccggcatgatgtggttcagttgtcatgaaggtttcggccggggaggggcatcatggcatcatcacgttcactgcacacggttcatctggccgctttcggcgcgggcaatgtcgtcggtctgggggtcatgtcgatggccggcatcggcgtcggcatcacgggcaccggattgtggctcgccgcgctggtcggtggactgggaggcgcgttcgcgctggtgccgcagctgctggccagctcgtccggcgattacccgggcggccagtaccagcaggtcggcacgctgctgccgcccgtgttcggtggcatcgtcgcctatatcctgtgttttctggtgttcgacatctccgcgtacgcgctgtccgcggcgcagctgctcggcctgcccacgctgccgacacgcctgaccgcggcgttggtcgtcgcgctgttcctcggcgtgcacatgctgggtgcccgcatcgccgccatcgcccaactggtgatggccgtgctgctcgcggcggcgttgggcacgtacgttgcggtgacaatgccgcacgtgcggctcgcgaatctcgcgcattacacgtttctcggctcgtctctggcgttcctgttcgcatgcgtgtacatgacgttcatgatgaacggggtggccggcgtggcgaactatgccgcggtcgcggaccgtccgcgggtgacggtgccccgcgcgatgcgcgtctcgctgttgctggtcgtcgtgacgtatgcgctgatctgcgtggccgatgccggcgccttgccgatagcccaggtcgcgaaccaggatctcgccgtcagcctgtccgcattcgtcccggctccggtgacggtcgcgttcgtggtgggcggctccgcgttcgccctgctcaccacgctcaatgccgcggtcggctgcgtggcgtatccggtcgcctcggcctgcgcggacggatggttgccgcgcgaactgggagagcgttccgctcggaccggcgctcccgtgcgcctgctttcggtgggcatgatcgccgcggagtgcccgctgatcgccgggaattccgcgaaaaccgtgtcgtcgagcgtcacgattctgatgatcgtggtgcaggcgatggtcgccgtcgccgcattgcgcctgatactgcgcgacggctcatcgctctgcgcattccgctcgctgccgttgctcggccgcgtgccgcaatccgggctcgcggcgttgtgcatcgtcgcgctgctcgtcgacctgctgctgatcgcatggctgctgtacacgatgaaccgtctgctgatcatcggcaatgtcgtgatattcgccataacggttgtcgccgctgtcatcgtgaacaaatatagggttgatacgaggccataacaactatgtataaccgcgggtttgccaacgcggcgacgcggagcctacgatgatgtcaacgttcacgggaacccgcgaacaggcccggccccggatgatggggcggcaccccggtcaggtgtcttatccgagcaaggagtacgttatgtgtgtcaatgaaggcgtgaaggcatcggctgtcggctcactgtcgggcggactgccgatcatgcgcgagcggtgagagaccgctcgatagtccgtttcggatgtttgccggcgtgatcgcgatgattgtgattcgccgtccggcatgattcctcacactcccggcagattacgccgacggttgccggatcattcgcggcgatgcggattctgccgcatcgcaggttttcgtatatcgcgattcgccgccaccaaactgtaccgccgcgccgtatccaaaaacggcgcggaagacaagaagaagggaatatccatgtccacatcatcagctcgtcatgaagcgccacgcaacgggcggcccgtgaagcgccggcttatccgcgtgctcgccggctcggccgtgataggcgctatggcggtcggcggcctgcaattcgcgctcggcacggcctacgcggccggcgacgtgtgcgacctgtgctcgaccaactacaatccggtcgcctgctgttccagtggcggttcggcctacgattccaaccccggaggcggcatcgacgtctcagcgcagaaggccgcgttcgacagctactgcgcgaactacaagaaggagcacgcccagaaggaggagccggcgacgcccgcccccgccacgaagccgagcaacccgaagcaatcggccccggccccggcgaagcagtcctcgggctcgccggccacccagacgacgaagccctccacgggcaacaccaccgcgcaacagtcgcagcccgcgcagtcgaccggcacacagtccggccagagcacgacgggcagcacagccgggatcacaggcgacacggccgcgaacgccgatgccaccgccactcagacctcgaaggacgcggcctcccggaagaacagcgatgacaacaccgccgacaccgctggcggcgagaccactacgaccgaatccggcatcaccgacagcggcactgatacggcggaaaccaccacgcaggcctctccggtcaccgatcgggccgaaaccaccagcccggtggtgcgcattgtcgccggcgtggtcatcgcgctcgccgtcatcggcacgctgggcgccgcgctgattgcgcgcaacaagcgccgcgctcccgcgctcgccggagcgaacggcggccggtccgacgacggattcgacatcgcagacggcgcgacgccggcccccgcgacgacggcgaacgccattgccgcaaccgaagcccgtgccgacgcgagtgcgccgaccgaagtgctgcagcccatcgcatcgccggcgaacgggccatccgccgggccatcggcgagtctcaacgtggccgacagcggcggcgctcctaccgcacggtacgacttcaacctcgtcgacggaccatcgtcccgctgagccatcggcgcagcagtaccaacgcaattcgatacggaagaaatacagaagggaaccacaacaatgtccaacaccaaccacagcctcacgagaggctccatcgccgctaaagccgcggcgctgctcaccgcggcggcgctcggtctcaccggattcgcgctgacgggcgggaacgccgcgtccgccgccgaaaccacgcccacggcggcaacagccgcacaatcccaggaagacacgccgttcgactactacgcgggcatccccaacctgccttcggatcacgtgttcgaaaacatcacgctggaacgtctcgaagacatcctgcgctacggcaaaggcaacttcgtgatactcgtcggcggcacgtgggactccgcgacgacggccgcactgcccgccatcaacaccgccgccaaggcgcagggcatcgagaagatctacaatttcgacccgcacctcgacaacgccggagccgacacgctcgtcaacatcaacgacaagaacaacgcggtcgacgcattcgccaagcggttccagcagaccatcgacgaattcggcctgaccgacctgcaaagcaagaacacggcaaacgtcgtcgacctgccgaccctgttcacctacaacaaggacaacaccggcgacaaggtgctcgcatccaccgcgaacgttgccgacagcgccgagctgacccgcgtgctgggcaccgcgaagaacgccgcgacccgcaccaacggccagttctacaccaactactacctgaacaacgtctcggccggcgctgccagcgtgttcaagcagggcgaggacaaggacttctcgctcatatcggtgacgtacggcgaactggagaagctgctgcagtcgccaggcaaccattacatcttctttggcgcgacctggtgcggcaacacatacgccacgatccgctacgtgaaccaggaagcccgcaaatacggcatcaagcacgtgtacacgttcgacacgatcctcgacagcacgtccggcaaaggctcgccgttccacatccgcgacaactacaacaacggcagccacccgctgtcggacctgtacacgcatctcgtgaacacgtacctgccgaacctcgtgaccgaggacggcagccacggcgtcgtcgattccaagggcgtcggcgcgacccgcctgcaggtgccgctgctgttgcactacaacaagaacaacgccgcacagctgcccggaaccgaccagccggccggccccgtgaccgatgaggtcgtggactaccatggcaagaccgcgaacgtcgacgccaagccgcagcccacggcgagggaatacatgctcaactggtacggcaccacgtacgacgacaaggcgatcatccaaggcggattctccatcaccggcgacgacctgagcgcggcgaagaactacgggcgcaaggtcaacaacgaccgtgacgcatacatcgcccaggccgaccacttctactccctgctcaacctgcgcggcgaaatcgcacaagccaagacggtgagcctggacggttactccgccgaccgggtcgccgcattcaagaagacgctcgccgcggccgaaaagaccgtgtccgacaagaaggcgaccatcagcgcgaccgacaccgccacgaagaacatcgccaatgcggtcacggcgctcgccggaggcaacaacggcggcagcggtaacggtaacggcagcggtagcggcgacacgggtaacaatccggtcgcaggcaacactgacaacgctggcggcaacgatagcacggccggcaacaagccgtcccgcaaaatcgtcgtcgccggcaacgagccgctctcccgcaccggtgccgaagccacggtcatcgcatccgtcgcgctcagcctcgcgctgaccgccgccggggcgctggcgctgagccgcaaccgtggcgacgcggcggcggcacaggctctctccgactcgacccgcccaacctcggcgaggtgagctgactgatgggagcgctatccaacatcggtcccaccgcagtggcggtctgggcgtcggccgtggtgctgttcgccctgatcgccgtgctgcgcgcggtcttcaaactcaacttcagcctgctgacggtgctcgcgcttggactgggcatcgccctgagcctcgtgttcgacgggcaggtcgactcgctcaacttgctgggcaacatctacatcaacctgatcaccgcgctggtcgcgccgctgatcttcgtgtcgatcatctccagcatcacctacgtcggcagtctgaaaaagctgcgcagcatcggattgcggtcggtcggctggctgctgctcaccaatctgatcgccatcgtgatgacgctgggtgtggccatcccgctgcacatcggctcgggcgtcaaactcgtcgacgacgagtcgaccgccggtttcctcacctcgcagacagcgccgctcgaccaggtcatactcaacttcttcccgaagaacatcgtcggagacctgtccggcaaccgtgtggtgcctatcatcatcacggccaccgtgctggccatcgccatcgtgtcggtcggtcggcagaaggacgtgagcatcgtcaagcggttcttcgagcagaccaaggacgtgatctacaaggccgtcggctacgtggccgagctcaccccgtacgcggtggtggtgctgggagcgacctcgacggccgcgaccacatccaaggcggacgcgctactcgcgctgctgagcattctcgtgctgggcttcgtgctcaacatcatccaggcgttcgtcgtcaacgggctgctgctgaaattcgtggcgcacgtgtcgcccttgacgttcttcaaggccgtgctgccggcgcagaccacggcgttcgccacgcagtccagcgtggcgacgctgccgctgagcatacggcagctcggcacggtcggtgtcggcgcggacgtggcgaacttcaccaccccgatcgggacgaccatcggcatgccgggatgcgctggtgtgtggccgatgctgtcggccgtgttcaccatcaacgcgctcggactggggtattcgccggtgagctatgtggcgctcgcggtgatcggactgctgtcgtcgatcggtactgcgggcgtgccgggcactgcgatcgtgaccgcgacgaccgtgttcaccgcggttggtcttccggtgcagcttctggtgccgctggtgccggttagcaacatcgtcggcatgccgagcacgatggcgaacgtgtccgctgcggtcacatgcgcggcgatcgtatcgcggcagaccggggagttcgacgagggcgtgctggattcggctcgtgccgggcggcatcgccatcgcgcgggcgtggtcgtgtcgccggctggcggggcggttgcggctcctgtcgttcctgttgcggctcccctcggcgcggtgggtgttgcggcgtccgtcgtcgcctcgcccgtcgctgctggagttggtgcggcccataagccggtgcagccgggattcgcggtggcgcctggattgtcattgacgttgcatcagtcgatgctgcgtgtgcaggccgacgacaatgccgacgacgctccggtgcccgttggcgcgtgcggcatctccgcccacgccgccacggcaaaagccgcataggctggcgagtgggctggctggggccgcctccagtctcgctacgcttgacagcccccgctggcggggggggctgtcgagcgtagcgactgggggtggtcgaaggtatgtccagatgaaaaaagcgacccgcaaacggtcaaattacgcgggtcgccgtgagtatccgagcaagggtacccgcaaagcatcatagcatatgaggcatgtgagcaagctgagtcgcgtatcggagccgtctgatatatggcacgtacgaccatgcaggaccggtggtgcggttgcggtcgtttcgccggggcggccataatggtgtcatgcatgtgatttcaggacgattcaagggcgtcgcgttgaccacgccgaaaaccggaacccggccgaccaccgaccggaccaaagaggcgatattctcgcatctggattcatggcaggtgctggacgacgcccgcgtattggatctgttcgccgggaccggggcgctgggcatcgaggcgttgagccgcggcgcgagggagctggtggcggtagagtcctccgctccggcggcggcgctgatcgccaagacgttgaccgcgctgcagcggaaccgttcgtgggagcgcggcatgacggcccgggtcatcagggccagagccgagaagtacgtcgcttcgggtgccgcacgctcggcctcgaacgccgatgctgccggcggctccgcgaagtcggcggcgttcgatgtgatcttcatcgacccgccgtacgcgttcgccaccgaggactgcaaccagttgctctcggacatggtcgcccatggaatcgccggcgggaatacgacgatcgtgttggagcgatccgcgcgttccgacgagcccgtgccgcccgagggatggagcctcgccgagcatcgcgagtacggcgagaccgcggtgtggtatatcgagtccgcgcttgaggcgtcggaggcctcggagacctcgggcgcgacggatgagtgagcagccgaggcgagtgtagcccgttgctgcgagcccgaagcggccttggcccaatcgccgccgtgccgatgttacctagctgatattctctgacagagaacatcggcatgtgggtcgcatggcgcacgtatcgttaatcatggaatagctcgaatcgaggtattgaatcgagctattaaaagacagtgaaacaacaaacgcaatgccatcgcgaaaggatgccatcatgtcgaacttcatcgaggaactcaaggcccgtcgctcgcagtacgtgctgacctccgaatccccggtcagcgatcaggagatcgtcaagaccgtcgaggacgtcaccgtgcaggtgccgagcgcgttcaactcccagccgcagcgcgccgtcgtgctgttcggcgacgccaaccagaagctgtggaacatcgtcaaggagacgctgcgcaaggtcgtgagcgatgacgaagcgttcaaggccaccgaggccaagatcaacgccttcgccgccggccacggcaccgtgctgttctacgacgacaccgacgtgaccaagcagctgcagaagaacttcccgacctacgctgcgaacttccccggattcgcccgtgatgccgccggcatgctgcagctcgccgtgtggaccgcgctcgccgagaaggggcttggcgcatccctgcagcactacaacccgctgatcgacgaggcggtcgccgccgaattcggtctgccgtccagctgggtgttgcaggcgcagatgccgttcggcaccgtcgcccaggccgcggctccggttgacaagcagccggttgactcccgcgtgaaggtgttcggcctgtaagccgaatggtcgctcccgctgccggggtgggggcgaaataccaacgagccaataaaaaacccgtgaccggttgcatgttccgcatgccggtcacgggatttttgcttgactgttgtttccgccgccgacctgtacggccggccatcaggcatcagccctcaatggcgatctggtgcttgctttcgacctgcggctgcgcctcgatcttcggaacctgaatgcacagcgtgccgttctggtagttggcgtggatgtcgttctccttcacctgatcgccgacgtagaagctgcgcgagcaggtgccgacgtaacgttcacgacgaagccacttgccggactcatccttgtcgccgctgccttcgtccttatgggcggacacggtcagatagccgttgttcagcgagacgctgatgtcgtccttcttgaagccgggcatgtcgatgtccacgtcatagcccttgtcgttctcgcgcacgtccgtactcatcatgttcgtcggggtcatcgccgcgctgttgtcggcggaacgccaaccctcgaagaacgggtcgtcaaacaggtcagagaacatcgtgtcattcatcaaagccggaaacattgccataatcggtactcctcgcatatcggagtggaacgggttggcttgccgcgccggccgggtgactggccttgccggtgtggtctatcgtggccgttcccggaacccctctcggagctcctcctcttgccttgcaccactacctaccggtattctgtcctgacattcccagtttttacccacagtgaaaaagttgagcgtatgagaatcaacttttgcggggatagtggctgatgacgtgtgtcaagtgacttactgcagcttgcgcggacgcgctccggagacctcccagccaagggcgatgagtgtcttgcggtcctgcttgtcgagctgccggcaatcgagctgctcgatgagatccgggcgaatgtcgttggtgcgggtcaacgcttcgtcgcggcggaaccggtcgaccttgccgtgatcgccgctggtaaggatcggcggaaccgcgatgcctcgccacgtggccggcttggtgtactgatggtgttccagcagtgcgttgccgcccgtgtacgactcctcgacgatcgaatcgggattgcccatgaagcccggcagcagtctggtgatcgcctccagcatcacggaaaccgccacctcgccgccgttcagcacgtagtcgccgatcgagtattcgcgtacgtcgacgccctgcgcgcggtaatactcagggattcgcgcgtcatagccctcgtatcggccgcagccgaacagcagatggtcggcgtgcgagagctcggtcgcgtcgcgctgcgtgaacagcggcgccgagggattcgggaagatgagaaccggcgtggcgttcccgtcagcttcactggtgtcgctcgtggtatcggaaacgatggaagtgacggaagcggctgcattggtcggattacctgcatggcccgagtcggccgcatcggtcgtatcggctgcttccgccgagttgactgcgccggacggactgacggaggccgaatcatcgtcgtgcgcgtcggaagataccgcgtccggcgcgatgactgcgggtgccagaccgagcaggtcatccaggcattccgcccaaacctcaggtttcatcaccatgccggcaccgccgccggccggcgtatcgtcaacggaatgatgcacgtcatgcgtccagtcgcgcaggttgtgcgcggtgacggtgacgagacccttctcctgcgccttgccgaacaggctcaggttcagcacgtcaaaatactccggaaacacggacacgatatcgatcttcatgttctccagcgtagcgaatcccgcagtccgacggcatgagcgtcgcgacacgcctggatgtgtggcatggtttgtcggcgccggctgactggaatcgcatgagtccgatgtcttttataaatcgcgtctgtcagccttgctgcgcatccgggcgtgccgcattgttgccggactcggctcggcgcccggcaacaacgccgtcatatatgacagtgtccgacagccgcatctgtcggacactgaagggtgaccggggccgaatcacagtcccggaatcagcccgccgggcgggtcgatcgtcagatacccctcttcgaggtcgatgtcgggcaccaactcgtcgacgaacggcaccagtgcggtcgattccgtcacttcgccggtgacggcgtcccgaaccggcgaggccaggcgaatcttcaacagcgtctgcgcgctgtcgagtacgtccacgaccttgcctatgacctggccggccggcagaccgagcccgttgccctcggcgagccgcgcttcaagcccgaccagatccttcggataccaggcgtcctcttccagcatgtcctcgggatcgtcagcctcgccgtacagctcgatgccattcgccgcctcggaggcgtcgcggtcatcaatgccctcgaacttaacgatccaacggttcttgaatgtgcgcgcgtactcgacgacgtattcctgcgaaccgtcgcgcgtgtacagcacggagtcgggagcgaaccgatattccggctcgtccgtgaagatctgcacggtgacctcgcctttgagcccctgcgcgcgtccgatacgacagaccctcagcaactcgcgctgctgagggtcgtcagagtgttgttgacgctccacgctagggttcacctgcgcacatccatgatgtcgacgcgcactttgtggtcggcaagtgcctgcaccacggtgcggatcgcattggcggtgcggccgctgcggccgatcacgcggccaatatcctccgggttcacgcgcacgcgaatgagttcgccgcgcgcgttctcgtgggacttgaccgaaacgtcatcggggaaatcgacgatgttcttgatgaggtgttccacagcctgcgcgagcatgatcactcagcctgcgcttcctcggcgggagcttcagcttcagcggcagcttcggcttcggccttggccttggcgtcagcggcggacttcgcggccttcagcttctgggcttcggcttccacggcttcgacgcgggctgcggcgtccgggccggcttccacggtcttcagcgtgccttcggcaccgtcgaggcccttgaacttctgccagtcgccggtgatcttcagcagcttgagcacaggctcggacggctgagcaccgacaccgagccagtactgtgcgcgctcggagtcgatctggatggtcgaaggctgggtgttcgggttgtaggtgccgatctcttcgatggactgaccgtcacgcttgttgcgggaatcggtgatgaccacgcggtagaaggcgtagaacttcttacccatacgcttcagacgaatcttggttgccaaaatggctctccttgtaatactaggtttgcggattttcgattgtgtgtggggcacctcaaccgagaacccacgtgttcctcatgaaaggcagaatgagagggctccacccatcacgaataaccgataaattataacgcataggggtggatacccgacacgctggagctggcgagcgatcgtcggggtcgacgtggcaaaaacatcggcgcgcaaggtgtctgacgtgatgcttgaaagcctggtcgccattcaccggcggaggattcggggctatctgcatttcgaggggttgattcgtgttgttccgaatgcctatctgcgtttcgaggggttggtcacaaagtataagcggcccaagaaccgcatgattccggtggtatttcgccgatcatacttcggatatcgcgttttggcgcccccttgaaacgcagatagatgtccggcggagccgaaatcaaccccttgaaaacgagatacggccacatggggtaccttggccggtcgcagcgggcggtttcgagacggataacggcgggtttgcttggacgctgtccagcccgaagccgccatcgaggcctataccaaagaggccagggtttcggcggcggccgcgaactcctccggcgtggtgtaggagtagctcaggcgcagcgagttgtccccctcgaaatcgtagatgtcgccggggttgagcagtacgccgtgctcgattgcgcgctggaacaggcgccctgtgcgcaccggctcgtcgaacgtgagccagacgtaaaaaccgccgcgcggcacgttccagtgggcacggccggcgaacagtcgctccagcgtctccagtgcggcgtcccgccgccggcgtagctgcatgcgcagcgagaccatgtactcgtcatacaggccgctggacaggaaccgcgcgaacacccactggctcagcgtgctcgccccgtagtccatctgcatcttcacgtcggccagccgttgcacgatgcgctcgtccgccacgatccagccgatgcgcagtcccggcgccagcgccttcgacgcactgcccagcgtaatcaccatgccggtctcatcgaacgatttgagcgtgtgcggcgtatccccgtcgaagatgaggtcctggtatgcgcagtcctcgatgatcggcaaccggttcgccacgcatgaggcgatgagcgcccgacggcgtggctcgctcatcgtgacgcccgtgggattgtggttggtggggattgtatacagcaccgcgtcgttctcgcgcgtggccttggcccgcggcggcagtgaggtctgcggggcggacggtaccgccgccgtcatcccctcggactgcgacccgccgcccatcagcttccccagcgcatccacgtcaaggccatgctcgtccatcggtacgccggcgagtttcatgccggccgattggaacacctgcagcgacttgatgtagctcggcgcctccgcatagaccgtggatccggccgacagcagactcaccgaaatcatctgcagcgcctgcaatgcgccggatgatacaaggacctgcccgggcgtgcagctgatgccccacgcctccatgtgcgccgctatcgcctcgcgcagcacgtcaaggccctccggcggcggatacccgagcgagcttatctcggccgcggcttcgccggccacgcgccgccacatgtcacgggggaacagccgcgggtcgagctcgccggtgccgagacgggttttcgaccggtcgaattcgagtcggtttatcgtctgaatggtgtcgttgttcgccttgaagaacccggacgacacgtaatccgcccagtccggcgcgcccggcaacatcagcgaccacgtgttgctggcgatgcgcgtgccggcgccgtgccggccttcgacgatgccgtagtcggcgagctctccgatcgcggcgatgatagtggaccggttcacgccgaagcgttcggccagtacccgctggctgggcagtcttgatccgatcggccagtcgccgcttgagatgcgggcgcacatgaaaccgacgatctgttcggttatgggctcgccgctgctgcggtccggctcccagttgatgtccaatggtgtgctgcgtgtcatgatgcctgatttttggttgggtgcattgctctgttcttggctggttgccaagtgtaatcgaatctgtagaatatggcaaaggtgttggaataaagcggattctgtataacttgcaatccgcgtgaggaaatccagctgatggcatattggctggttttggttgggtgatgatgacccaaccaaatgattgtcgggagtgatgatgggtctgtatttccagggcttgacgatgggattggcgtatgtcgcgccaatcggcatgcagaatctgttcgtgatcaattccgcgttgacgcgtacgcgtcgcaacgcgttgattactgcggtgatcgtgattttcttcgatatcgtgctgtcgctggcgtgctttttcggcatcggcgcgttgatgcaggcgcatccgtggctgcagaccgtggtgcttggcctgggcggtgccgtcgtggtgcgcatcggtctgggacttctgctgccgaagaagaagtcgacttccgagaacggcgctggggccggtgcggttgctgctgcgactgcttcgacggcgagtccggtcgctggtgctgaagcccctgccaagcgtctcggtctgcgtggactgctgaagaccgttggcaccgcgtgcgtggtcacgtggttcaacccgcaggccatcatcgacggcacattgatgctcggtgcgtttgcggctacgctgagcgcgcagcaggccaccccgttcatcacgggcgttgagaccgcttcagtgatgtggttcctcggcgtcacgctcgtcgtcaacgcgttcgcgcacaagttcaatccgaagatcatcggcgtgctcaaccgcgtgtgcggcggcatcatcgtcctgtacggcatcaagctgctcgtggatttcgcgatggcggtgctgtagtcgggcaatccaagcctcgccgcatggacttctacgggagcccatgcggcattgttgtttttgacgtgccgggggcgggccgtctcggtcattctgcgtcactgtgagcgggttgcgtcacgctgcgtgtgcccgcacagcgtgacacaacccggaaacccagtgattgcaagggttttgtgggtgcgtcactgtgagtgtgcccgcgctcagtgacggtgggcgcgctcagtgacgcatatccgctatgctgtccgtgcggcatgccgctcaaatagtcattgtggcggtcagcgcgaggtggtcggtgtcttccacgacgaatgattcgacgccgctgaacgcgacggctcgtgccggctcggcggcggagcctgacgcggattctcgcgtcgcggccatgatgtggtcgagctcgatgcgcggccacggcacctgactggggaaggtattgacatgtccgcgagcctgtgccagtgcggcgtcgcggaatccggaccgcagcagctcgcggaagctggcatggtcgatatcggcgttgaggtcgcccatgagcaccgcgatatcgacgtcgggatatgcggaaccaccgccgcgtccggctttcgagccggtggcacgttcctcgcggccagtgcctgcgctgaccgacttgcgcggtgtcggaaccagcgcgctcagggaccggatgccgtctgaccattcccgacagccgcgcatcggcgatttggtgtgcgcggatgcgaatgccacggaggtgccgtcatcggtttgcagcatgatgcccggcacgtcggccgcaggtatcgagacaatgccatgcgtgccgcgtttcggcttggtgcgcgaccagatgccgttgaagccgccgttgtcggtcttttcgcggggcgtaccgagctgccgataggggaggatcctgcgcaggccgccgcgctcaagacgcttgatgagatccgtactgagttcctgaagcgcgaggacatcgatatgtcgttcccgcacggccgcgatgatggcgtcggcgctcgccttgccatagcggcagttcaacgtcatcagatggtaggtgtcgccgctcgcctgcggcgggttcgcggtcggctcggcgtcggcggatcgcgcggtctggcgatggtcgtctgacgctgtttcatgggatgttccacgctggtggtgccatcgttcccgtggcatgttcgtccaatacggaacctgcatggcaagtatcgacacgatgccggcgacggcgacgccgcactgccaccacgagccgaccagaccggcccataccgcgatgaccaggtacggtatccacaaaaaacgaatcagcgcaatcatgtaaggcatcgtcggcatgtgcgcttcccgtccggctggcaggaaccgcaacgccgaccatagcatgcacgccgccagcagtatccacgacaacacgcccaccgccgaactccttacctaacattccaacgagtgaataatggctttcagtgtaccggcagccgttgcgaattcgcggcgagtggaaagctgcgaagatatggcaaatgatttggcgccgggcggggatgaccgaaaacgtccatccccgcccggcgccagagaaaaacgggccgaatcagccgagcagaccggaaaggccgccgccgaagttgggcggaagctcgccaccgttcgcgtcgagcgcatcctgcagcccggccggaagagccggattctgcggcttcttcatgaaggcggacccgccggacttgccggaaccggagcccttgccggcgagcttgtcgcgcaacgccttctcctcggcctcgcgcttcatcggattgccggacttcgagcccttcttcttgctcttgcccttgcccttcttgccgccgcctaccgcagggcctccgaaaccgggaatgccgcccatggccttgttgctcatgcgcttcatcatcttcgcggcctgctcgaaccgttgcagcagcccgttgaccgccgagacggttacgccggaaccataggcgatgcgggcgcggcgagagccgtcgatgatcttcgggttgcgccgctcctcgggggtcatcgaccggatgatcgcttcggtgcggtcgatctccttctcgtcgaactgctccagttccttgcggtgctgcgccatgccggggatcatgccgagcagcgacttcatcgagccgagcttgcgcacctgctgcagctggtccatgaagtcgtcgagtccgaactcgccttccgccatcttctgggcggccttgcgggcctcctcctcgtcgaactgcttctgcgcctgttcgatcagggtgaggatatcgcccatgtcgaggatgcgcgaggccatgcgatcggggtggaagacctcgaagtccttgagcccttcgccggtcgaggcgaacaggatcggcttgccggtcacgctcgccaccgacagcgccgcaccgccgcgggcgtcgccgtcgagcttggacagcaccacgccggtgaaatccacgccctcgtcgaacgccttggccgtctggacggcgtcctggccgatcattgcgtcgatgacgaacaggatctcgttggggttcacggcatcgcggatgtcgcgggcctgctgcatcagcacttcgtcgacgcccagtcggccggcggtatcgatgatgaccgtgtcgtacagcttctgcttggccagcgcgatcgaatcgcgggccaccttcaccgggtcgccggaggtctcgcccggcgcggacaccgagtcgcccccgtcggactggacgcccttctcgggcgcgtacaccggcacgccggcgcgttcgccgaccacctgcagctgggtcacggcgttcggacgctgcaagtcggcggcgaccagcagtggcgtgtggccggaatccttcagccagtagccgagtttgccggcgagcgtcgtcttgccggcgccctgcaggccggccagcatgatgatcgtcggcgggttcttggcgaagttcagcggccggtccacgccctggccgagcacatccgtcagctcctcgtcgacgatcttgaccacctgctgcgccgggttgagcgcttcggacacttcggtgccgagcgcacgttcgcgaatgcgcgcggtgaaggaacgcaccacgtcgagcgccacatcggcgtcgagcagcgcgcggcggatctcacggatcgtgccgtcgatatccgcctcggaaagtttgcccttgctcttcagatgcttgaacgcattcgagagccggtctgtcaaagaactaaaagcagccataatgcgaatcagtctagccgttgcggcggaaaaccagcgggttgccgccgaggcggcccgcacggcgacggagaggtgccgcggggcgccgttcggcggtcgcggctgcgcgtgggatcgacgcgagagagcggcggaaatgcgacagaaccgttggccttgtgggcggtggggatccccgcacgctcagcgcgaaccgacacgcccggaatcgttcgtttccgttaccatggaagggcaataattccgtggattattggatcgctgagctgttttgattatccttcggacccaacctatacgcagactgccgcgctgacgccgacgcagacatgccgtgcaatatggaaggcccgcctatgccacaccagaaaaccatcgaacgcaaagccctgatcgtgggcatcgtcatcaacatcctgcaggtgctcgcaggcatggccgtgttcttcatgaccggtctgaaggccatgttcctggacttctccttcaccgccatctccgtgctgtccggcctcgtcgccgcatacctgtcgtcgcgcaccgtgcgcaccaccgagcgcttccccaatggcatgttcgctctggaaccgatatacgccatctgcaaggcgatgctgacgatgtcgctgctgctcttctctctcgtcgatgtgacgcgcgtcgcctatgactatttcgtgcttgggcagggcgggcgcatcgagaccgggcccgtggtgatttacgagatcctgaccgtggccatctgcctaggactgtacctgtattaccggcgcgagaaccggcgcatccgcaattccagcacgatgctgaccgcggagtgcaagagcacgctggtcgacggttcgatgtcgttcggcatcggtgtggtggccgtgttcctgtggttcctgccggctggtggccctctggatttcctgcattacaccggtgatttcttcatcaccgtcgcactggtgctgctcacgatcaaggagccgttcggcgtgctcaaggacgcgttcgtggaactggtcggcggagtgcatgacgacgatgcgacgaacgcgttcgtggagtcggcggcgcagcggcatctgccgcagaacaccgattacgagcaggtactggtgttcaagaccggcatgaactatacggttgatgtgtatctgagcggtatcggtcagagcattgacgttgaggatctggtggagtgcaagcgagacttggagaaggagctgaccaagcggctgcatatcgtggatgtcgatttcgtgttcgattaaggagcggaacaggatcggatgatcatgactgtcccgcgatgatgccggggcgttcctgcttggtatttgattgcatttgctggcataatgccagcgacaatgctgggctgctatcggcgctttcaccgtcaaaatatgctccgatcgcataaccgtaaccagttgagccccgctttgggggcggggctcaacataacggatcacacagtgtcggggagattacttcaaactccacgtgctgccttgcgggccgtcctcgatggcgatgccggcggcacccagcgcgtcgcgaatcgcgtccgccttggcgaagtcgcgggacttgcgcgcttcggcgcgggcgttcagctgctccgtgatcagggcgtccagcacatcatgctcgcggctctcgccgttgccgtccgcgcctgcggcaccggcccacggctcggccagcggatccagtcccagcgcatccagcatcgcccgcaccgcgaccagggcgctgcgcacctcggcgcgggccacatcgccgtcggcacggtcatccagcttgctcagcagcgtgttgccgttgcgaatcgcggtgaagatcgccgccgtggcgccggagacgttcacgtcgtcattcatcgcggagacgaaatcggcgggaagatcatcggcgctgaccccggcgatctcggcgcgctcgggctgctcgcccaaagccacgccggcgcgctcgatgaagttcatgatgcgttcgtatgcggcctgggcctcgaccagcgcttggtcggaccattcgagcatcgaacggtactgcacggagccgagcgcatagcgcaccacccatgcggagtgctcggccagcacactcggcacggacaggccggtgcccagcgacttcgacatcttctcgcccttggcggtcacccacgccgaatgcatccagcgtgcggccgactcgtatccggcggcacgcgtctgcgccatctcgttctcgtgatgggggaagcgcaggtccagtccgccgccgtggatgtcgaacatgccgtccagataccggtggctcatggccgagcattcgatgtgccagccggggcggcccacgccgaacgacgtcgaccagcgcgcgtcctgcgggtcggtgggcttcggcgccttccacagcgcgaaatcgcgcggatcgtgcttgtcgggggatgcgtcggcggggtcgatcggattgtacttgtcgtcgccggccgcatccacggacgggcccatgcggtcagccacggcggcggcctcgtcggcctcggcggcgccctgcttctgatgggtcagctcgccgtaatgcggccagctcgccacgtcgaaatacacgttgccggtcggcttgccatccgcgtcataaactacgtagccgtgaccgttgtcgatgatgcggcggatcaggtcgatcatgtcgatcatgtgcccggtcgcgcggggctcatacgtcggcggcagcacgccaagcgtgtcatacgcctgcgtgaactcccgctcgtagaagtacgcgcgcgcccaccactgctggcctgccgcggccgccttgtcgaggattttgtcgtcgatatcggtcacgttgcgcacgaacgtgacctgatatcccagccgcagcatccatcgccgcaccacatcgaacgcgacggccgctcggatatggccgatgtgcggggagctctgcacggtggcgccgcacacgtagatccccacctggccgggcttgatcggggtgaaacgcgagaccgtgtgcgaagccgtgtcatacagcttcaggccggccgcggcgcgcgccacgccggcgttctcggaagtgttggaattctgcggttctgaggcttgtgtcataatgtcgagcgtattcgcgttatgcgacaaaccgccagacaaaccacccggcaaatgtgattgcgcggccgcccgggcgcggctggaaatacgagagatgaagaaacggtgtgcaaagtttacgtaggtgatgcaacaatggagttatgacgcaatcgcaagtgcttatcgtgcagcacgtcccgtgggagaagccggggcgcatcctggacaacctggacgacctgaacatgtcgtccacggtggtgaacatcgccaaggaaaagaagcccgatctgcctgacttcgcgcaggtcgccggactggtgattatgggcggtccgatgggcgcgctggattatgacaagtatcccggtctcaaggtcgaggcgaaactggtcaaggcggccatcagcgtcggcaagccggtgctgggcgtgtgcctcggccatcagatcatcgccaccgcgctgggcggcaaactcagccgtggcgagtcgccggaaatcgggttcgcgccgatcaagcgcgttgacaagcacaattacttctcgatgtggaacaagcagatcgacgtgctgcactggcacaacgacgtggtggggcttcccgccggcgcccagctgctggcgcggtccgagcacaccaaggtgcaggcgttccgcatcggctcggcgctgggcatgcagttccatctcgaagtgacgccgacgttgctggaggaatggctggatgagtcctcgatggtcaaggacctcaaggcggtgggcggatcgaagtcgcagctgcgcgaagcgttcgccgaatataatccgcgcctgcagccgttggccgagcaggtgttcggcggattcgccgcccgctgcaacacctacgcccaatccctgcgctagcgaactgcgagttcgcccccgccagcgggggcgaacatgacgagccagcgggggcgtatggtggttcggacgttgatgcccaccgctgacgctacattggtgagtcatgccgacttatgaccttggactggaacacgtttcactcgccttcgccaccaaaaccatcttcaccgatgtgacgcagggcgtattcgagggcgaccgcatcggcatcgtcggccgcaacggcgacggcaaatccacgctgctgcacctgttcaaaggcactcaggagccggattccgggcgagtcaccaagcgcggcggactgacgttcggcatgctcgaccagcgcgacccgctggacgacgacgccaccgtgcgcgcggccgcgctggaaggccgcgaggattacgagtgggccgccgacaacaagtcgcgcgagatcgtcgaggcgctgctgggcggcatcaacctcaacgcccgcgtcggctcgctgtccggaggccagcgacgccgcgccgacctggcccggctgctgctcaaggattgggacatcctcgcgctcgacgagcccaccaaccatctggacgtcgtgacgatccactggcttgccgaacatctcaagaaccgctggtcgaaagggcagggggcgctgctgctcgtcacccacgaccgctggttcctcgacgaggtgtgcgagtcgatgtgggaggtccacgacggcgtgatcgacccgttcgaaggcggctactccgcatacatgctgcagcgcgtggagcgcgaccgacaggccgatgtgcgagagacaaagcgccgcaacctcgcgcgcaaggagctcgcctggctgtcgcgcggcgcccgcgcccgctccaccaagcagaagttccatgtcaaggccgcgcgggagctcatcgccgacgtgccgcccatgcgcaacgccgtcgaactcaagcagatggccacgtcgcgcctgggcaagcaggtcgtcgacctgatcgacgtcacgcagatcttcgcgaaaagccaaggcgagcagccggtcacgccgaccgacgacacggcggcggatcaggcccccgcctcctcctctcagatcgatatcgtcccctccctatactcggagccgcgcgtgatcggttccgtcgaagtcgccgtcgacacgctcgccgacccgcgtctcgtggacgccggcgtgccggaatccatccaggccgcagcggaagccaaggcgaaggcggaggcgctcgcggaacgtaagggtgtcacggaggagtcggccgcgccgcaggtcacctccgcggcgcagaagatcaccgtcgccggtcgcaagattctcgacgacgtgacctggctgatcggccccggtgaccgtttcggcatcgtcggcgcgaacggcgccggcaaatccacgttgctcaagctcatcgacggcacgctcacgccgacagccgggcatatcaacatcggcaagaccgtgaagttcgcggtgctttcgcagcggctcgacgagctggagaaactcggcaaatacaagatcaaggaagtactgtcccgctacaagcccagctatatcgtcgacggcaaggaagtcacgcccggtcagctgatggaacggctcggctttgaatccgcgcagctgatgacgccgatccgcgacctgtcgggcggacagaagcgccgcatgcagctgctgctgatcctactggatgagccgaacgtgctcatcatggacgagcccggcaacgacctcgacaccgatatgctcgccgtcatggaggatctgctcgacacgtggccgggcacgctgatcgtcgtcagccacgaccggtacctgctggagcgcgtcaccgaccagcagttcgcactgatcggcggtaaggtgcggcatctgcccggtggcgtcgacgattatctcgacatgatcgaaaaagcgaagaccgcagcgccggcaggcgtatcggcttcgcagaaggagccggccggctccggcgtcactgccacggcggacgacgcccccaagctcagcggcaaggaattccgcgagaccagcaaacgcatctccgccatcgagcgcaagctcgcaaagttggaggagcagaagaccgcgctcgaagcggatatggccgcccatgatccgagcgactatgaggggctgaataagctcaacgggcagcttcaggccgtctccgacgagtccggcgccttggaggccgaatggatggaattgtccgaaaaactggagtaatcgccgcgcgcggcgcgcgaccttacttcatcatctcttcatagatgcgcttgcagtccgggcagacggggtattgcgacgggtcgtgcttcggcacccagatcttgccgcacagcgcgaccacgggccggccggtgagcttcgattcggcgatgcgatcgcgcgacacatagtgcgcgaaccggtcggcgtcgccattgtcggaacggtcggtctgctcctcggtttccggacgctccagcaccgccgtccccgtgccctggtccggggtggacagcggcgacaccggatccgcgagatccgcggcgatccctcctgcgacggcggatgtcggctttagctgtgttgacggttcagatgacatttcgactccattccttcatccatgacgacatcatagcggcgaatggccggtctgtcttccgccggcatagattcatgataatgcccgcatgctaccgctgcatgtccggcgtctgagccccggctcgctcgtatacggactgtccggcgattcgcggtaggctatgcatatgactatcgcagtatgcccaggatcgtatgaccccgtgaccgcgggacatttggatgtcattgagcggtgcgcccgtttttttgacgaagtgcacgtggtcgtggccgtgaacgccgcgaagaccccgatgttcccggcgcatacgcgagtggatatcattcgtcaggcgctcgaccacgacggattccccgatgtcaaggtcgcgtccacgatcggcctgatcaccgactactgcaaggagatcggtgccaccgtcatcgtcaagggcctgcggcagaacggcgattacgaggcggagctgggcatggccctggtcaatcgcaagctcgcagaggtggagacgctgttcctgccggccgacccggtgcttgagcatatttccagctccatcgtcaaggacgtcgcccggcatggcggcgacgtgaccggcatggtgcctgatggcgtggtgccgatgctggacgaggcgttgagccatgagcgtggcgagtgacgtcgcgacgcgaatcccatatgatattgtctgggtttccggtcgctgatacgtgaccggaataaaagtaaagagatgcagcatggatgaatcaacgaacgatggcatcgtcaacgtcggtgacggcaacgacggcggcgccgccatggatcccgcgaccggcaccgagccggccgcgcagtcgaccgacgcctacagcgtcacgtatgcggccgcggcgcggctgaacgatgcgccggaaagcgcggcacctgccagcgtgtgggacgaaatgtcgcacaagccgcagccggccgccgctgcgacgcacgagaacaagccggacatatccgattacgcgaagcagtccaagccgacgttcccgatcagtcagctccccgatttgcgcgagacgctggatccgaaggccgacatgaaccccgaggaggtgaaatcccgcgaggagttcaccaccgtctatgacatcatcgactcgatggaggcgacgctggaggccgcgaagaccagcctgttcgcgcccagcatggtgcgtgtggaccgcgaggagttcgccggtcagctggacgagctcaagcggatgctcccggtgcagctggagcgcgcgtccgcgctgatgcgcgaggccgagcggcgcttggaatccgcacagacgcaggcgaatgccatcatcgcgtcggcgcagagccgtgccgccgacacgttggacgaggccaacaagcaggcgcagatcctcgtcggccaggagaacatcaccgacaaggcgcggcagcgtgcgcgtgcgattctcgacaaggcgcaggcgcgtgccgaccatctgaccaatggcgccgacgagtactgcacgacggtgatgaccggcctgcaggagcagctcggcaagctcagtcacgacgtgcaggcaggactcaacgtgcttgaggaacggcagcgcgcggcgggcgagcagatgccgcacctgaacatcaacgattatccggaagcgcagtaggggcgcgccggagtgtaacggaacgcgcaacagcatgcgcggcagcagcagggaggagatttgtatggcacgaccggaggattccgcatgggcggtcagcgtggcgcaggtggcgtcgcggccggggcagtccaagacggtggacgcggtgtttcccgcgccgagcggcatcggcgatgaggtcatcggcgtgaaggagggcgcggacgtcagcgtgcacggctcgttcgactcgatagtcgacggcctggtgctgaccgctcgcatcgaagcgcccgtcgcggccgagtgcacacgctgcctcaagcccatcaagcgcgattggggtgtggacgtcgtcgcgttcttcccctacgaggagagcgcgaaggcccgctcgcacggcaagcccaagaacgaggacgtggagatcgtcgcgggggaggacgagtccgaggatgtgtatccgctgagccgggacggggcgttcgccgacctggaggcgctgctgcgtgacacgctggtggaggcgctgccattgcagcccctgtgccgcgaggactgccggggactgtgctcgcagtgcggcgtcgacctcaacgagcacccggaccatcatcatgacgtaaccgatctgcggttcgcggctctggccgggttgaaggcccagctggaggccgaggagcacggcgacaagtaacggtgggcgatcggcgtgcgggtctgggaacctgctcgcacgacgccgcgacatgccgttgtacgggcgatgcgttaagataccgtacgcttaagctcaattgttcgaacgaaacagaggaataacaaatggcactgcctaagtacaagacctcgcgcgccaacacgcactcgcgtcgcgcgaactggaaggctaccgccgcccagaccatcgcatgcccgaactgcggcgctccggcgctgccgcacatggcttgcccgagctgcggctcctaccgcggccgcgtgtaccgcgcagccattcgctccgctcacaccaagtgatcgcagccgaatgccgatagcgaaatgaagaccctgccatcgacgggtggcagggtcttcgcatattgtcgcatattgccatccggacactgcgcgtatgcgttcagggcgtgcgcgtgcggccggatacggtggacaaggagaaaaacatgactgaacctgaaccgcgcgaagagctgttctccgcgctgggcgtcaccatcagcccggatctgctgatacaggcgctcacccatcgttcgttctcgcacgaacaccccggcacatcgaactatgagcggctggaattcctcggcgacgccgtgctggaactggtatcgaccgagacgctgttcacgctgcatcccgacatgaccgaaggccagctggcgaagatgcgcgccaaggccgtttcggaggaggccctgtcggcgatcgcccgggacaagttgcacgtcggcccgttcatcctgctcgggcacggcgaggcggagtccggcggtgccgagaaaagctccattctgtgcgacatcgtcgaatcgctgatcggcgccacgttcctggagcacggcatcgaaggcgcgcgcaaggtcgtgcaccggctcatcgacgacacgttggcggaagtggccaccgaaggaccagccctggactggaagacctcgctgaccgtgaaggcgcacgagctcggcctggatgagccgcggtaccgcatgagcgtgtccggccccgaatacgcgcaggaattcaccgccaaggccaccatcggcccgaaagacgacatcatcggcaagggtaccggcaccagcaagcgcaaggcgcagctcgccgcggcggaaatggcctggcatgagctcgaccggtacgcgcccgcgctcaaggcggcccgcaagaacggctcgtccaagcaccggcgcagcggctcggccggcaactgaccaactggtgaacggcgattgcgcgatgctgtcacctgtatgcttaaactgagaaaatacgaatcacagacgccatagccacaagcgaacgcgcatcgtgaccgtcggcgcacgcaagtcatgaacgctcgcgaggcgcgacgggtccaggcatatgaccgaacgatttgagttgagaggacatgatggctctacccacaccattgcaggcgttcagcggcgttccgaaaaacaccgcatccgcagacaagcagacgatcatcgacggtgagaaaatgaccggcgcgcaggcgttgattcgcgcgctggaggatttgggcgtgcaggacgtgttcggcctgcccggcggcgccatcctgccggtgttccacgcgatcaacgacgatacgaagttccggttcacgctcgtacgccacgagcaggccgccggccatgccgccgaaggctatgcggtggcgacaggccgcgtgggcgtgtgcatcgtcacgtccggcccgggcgcgacgaacatgatcaccccaatcgccgacgcgaacatggattccgtgccgctcgtcgtgatcaccggtcaggtgggcgtgaacgccatcggcaccgacgccttccaggaggcggacatcgttggggcgacctatccggtcgtcaagcactcgtatctggtgacccgcgcacaggatatcccccgcgtgctcgccgaggcgcactatatcgcccgttcgggccgccccggcccggtggtcgtggacctgaccaagaccgcgcagaccggcgagatgtattattcgtggccgcagcgcatgattctgcccggttacaatcccaccacgaaggcgcacggtcgcgtgatctcggatgcggcgaagctgttcgcgcagtcgtaccgtcccgtgctgtacgtgggcggtggcgcggtgcgttccaacgcgtccgccgaagtggccgaactggccgaagtgaccggagcgccgatcgtcaccacgctcccggctcgcggcatcgtgccgaactcgaaccccaaggcgctcggaatgctcggcatgcacggcgccgtcgccgccaccgcggccgcgcagcgctgcgacctgctggtcgccatcggcgcgcgctttgacgaccgtgtgaccggcaagcttgacgcgttcgcacccggcgcgcgggtgatccacatcgacatcgatccggccgaaatcggcaagaaccgcgctcccgacgtgccgatcgtcggcgacgtgtccaccgtgctcaacgacctgattcccgaaatcaagcgttctcaggccatcggcggcaagccgaacctcaagccgtggtgggacgagctcaaccgcctgcgcgaggaatatgccatcgattacgatcagccgtgcgataagccgaccgatggttcgctcgcgccgcagtgggtcatcaagcagctgtccgaccatgccgacccctccacgatctgggtgtccgacgtcggtcagcaccagatgtggtcggcccagctgattgatttcgagaagccgcattcgtggatctcctccggcggcctcggcacgatgggcttcggccttccggccgccatcggcgcttcggtcggctcccaacgcgacttcaagggtcgcaagccggtgtggctgatcgcgggcgacggctcgttccagatgacttccgaagagctgacgaccgcgttcctggatcatgcgccggtgaagatcgccatcatcaacaactccgtgtacggcatggtgcgccagtggcagactctgttcttcggacagcactactcccagaccaacctggctgacggcgattcgaaggaaggcggagagttcttcgacgtgcctgatttcgtcaagctcgccgaggcgtacggctgcgtcggccttcgcgcgttcaccgaggacgaggcgattgacgcgatcaacaaggcgaacgagatcaacgaccgtccggtgctgatcgacttccgcgtatggaaggacgccatggtgtggccgatggtggcagccggcgcgtccaacaacgaggtcgcgtatcgtccgggcacgcagccgctgttgcacaagggcgtcgacgatggtgaccaggcgtgacggcacggttgtcaaggaataaggagtaagtgattatggctatgtatcccgcttcccgcctcggttccgagcgtcacacgctgtcggtgctcgtcgagaaccgtcccggcgtgctggcccgcatcgccggcctgttcgcccgtcgtgcgttcaacatcaactcgctgtccgtctcgccgaccgagcgtccggacatttcccgtgtcaccgtgaccgccgacgtggaggccgtgccgctggagcagatcatcaagcagctcaacaagctgctgcacgtgctcaagatcgtcgaactcgatccgaacaccaccgtggagcgtgaactggtgctcatcaaggtggcggcgaacgagtcgaaccgttctgacgtgctggagatcgtgcgcctgttccgtgtgcgtgttgtcgatgtgaacccggagtcgctgaccatcgaggccaccggcgccgaaggcaagatcgacgcgctgctgggtctgttggagcactacggcgtgatcgagctggtgcgttccggcgcggtcgccgtgacgcgcggtccgaaggcgctgagcgaaaaggtcatcggctccgagattaagggccgctgatgcggtatcggcgtggccgagcatgacattgccgggcgggttctttcccgcccggtttttgtttttgcggtgatgctcatcggtgcagcacatcgcgcggattccccggaatcttgaagaaacggcgtctatcgcgaaagcggacattgtggaacatgccgtgcgaaatatgaaataatggtggggaagcgttgcaggggatcgatgccatcgcacagtctggttccgcacaatcaggttcgctacagaccggcacatcaccgttcgccatgacagcgcaatccaattcatcgcaatatgagccactggaaccttacgatacgatgacgggcactgcgattgccatcagcgatgccgacgaggccgaagccctatccgaatacctgacgtcccccgaccgccagcatcccgcggtagtggtgacccgtcgcttcggcaagcccctgttcgacgcgaacagcctcgcctcgaatctgcatgatgtcgccgccgtattcgacctcgtcaccccgaaagcggcgtggggggggggctgtcggcagccctgccggaaggcaccgccatgacgcgcacgcaattcgactcgatgcaggagctcgtcgaatttatcaccgacgacgacggccatatcgacgagtccgccgccgacgaggtgttccagtacctcacccagctgcagggcgaggcgcggcatcttcgcgagggcctgaaggtctccaacgacaggttggagagcatgaagcagaagatgatgcagaagcagcgcgagaactcgtacagcgacggacgccagtactgcaagtcgccgctgtcgctgttcgccgacaaggcggagggcaagcggttcgaacgcgagcagatggacatgctggtccgccgcgaatgggtcacgcggttcggtccggaagagaagaaaagccatgcgctgccgaggacatgggcgtattccgactggttcttcgacacgctggcatccacacacatcagcgtcagcaaggtggtggccgtgatggtcgaggtgctgaccgggcttgacatcgagctcgcggggcgagaaggattacagtacggtgatttcggtggggattaccggctcgcctttcatcaggctttgcgcggtgatcggcagttcgcgcagggccttggcccggtattcgtgcgcgtcggcgatggcggcgtgaccctgataacgcgaatcgatgtcaccgtggtcgacgtagtcgaccagcaggtccttccatccctcagccggacgatactcggccagctgggtttccgatccggagatcacatgttccgtctcggccagaccatactcatatgaacggtaggcgagcttgcggccgggaacactggccttgtccttcgacttcttcgccacgggctgcatcacgccagccgaattctcgcgctcggtgagcttgtacaccatcgcgcaggtcggggcaccggagccggtgaccagcatcgtgcccacgccgtacgagtccaccggcgcgctctgcagggcggccagcgcgtactcgtccagatcgttggtgacggtgatcttcgtgttcgtcgcgcccagggcgtccagctggttgcgcacgcgctgcgccatggcggccagatcacccgaatcgatgcgcacgccgcccagctgaggaccggcgacctccacggcggtcttcaccgcctcttcgacgttgtacgtgtccaccagaagcgtggtgttgcggccaagcgcctcgacctgcgaggcgaaggcgctgcgctcgtcatcatgtacgagcgtgaagcagtgcgcggcggtgccgatggccttcagtccatacagctgcgccgcaagcaggttcgctgtgccctggaaaccgccgatgaccgcggctcgtgcggctgccaccgcggcccactcgttggtgcggcgcccgcccatgtccatgcaggggcggtccttcgcggcgctcaccatgcgcgaggcggcggatgcgaccgccgaatcatagttcagcacgctcagcaccagcgtctccagcagcgtgcactcgccgaacgtgccctcgacctgcagaatcggcgaattcgggaagaacatctcgccctcgcggtaacccttgatcgaaccggagaaatgcaggttctccagccacgaaatcgtctccttgctaaccaccttgcggtcggacaggaaacgcaggtcctcgtcgctgaggaggaaccgacccagctcatccagaatgcggccgatgcccgccacgacaccgtaacggcggccttcgggcaggtggcgcgtatacacctcgaacacgcatttgcggttcgccgtgccatccttcaggctggcgtccagcatcgtgtactcatacatatccgtcatcagtgccggtgaataatcgaccatgaccgccctcccgcaagacaagaatcgtgtgttatccaaaaccctagtgtcgcgcggcgactcgcgcaagagccattcggcgtgacggcggtcacgatggctgccgcagcggcggcgggagacgtgccgcgctgcgggcacgttcgccgcatggtgctacgttgaaggcatggctgaaatcaaagacatgttggacaaggcaatggtgattcgcgcggacggccgcgtagtggacgaactgcgcccggtgcgcatcacgcggcacttcacggacgtgcccgaaggatcggtactcatcgaatgcggcaacacgcgcgtgatgtgcacggcgacgttcacaccgtcggtgccgcgctggcgcaaggattccggactcggctgggtgaccgccgaatattcgatgctgccgcgagccaccgccgagcgcaccgaccgcgagtcagtgcgcggcaaggtcggcggccgcacccatgagatcagccgtctgatcggccgctgcctgcgcggcgtcgtcgacatgaaggcgcttggcgagaaccagatccagatcgactgcgatgtgctgcaggccgatggcggcacccgcaccgcctcgatcaccggcgcgtatgtggcgctggtcgacgcgatgcgctgggctgagcagaagcgccacattcgttcggccgaccgcgtgctcaaagacgccgtttccgcggtgtcggtcggcgttatcaacggcacgccgatgcttgacctgccctacatcgaggacagtcaggcgatgaccgacatgaacgtggcgatgaccggatccggtgacttcatcgagatccagggcaccgccgaacaccgcccgttcaaccgcgccgaactcaacacattgctcaacctcgccgaaaagggcaacaaggagcttcaggccgcccagcgtgccgccctctcgctcgattgaaacgagtcgggcacgccgccggcgggcgatcggcctcaccccgtcatgcacaaccataggtaaggaataaaggacccccatgaaactcgtcgtcgctacgcacaacgaaggcaaactcgttgaaatccgccgcattctcgaagaggatctgggcgcggacgccgctcaggtggagcttgtctccgccggcagcctcggcctgcccgacccggtcgagacgggcgtcaccttccaggagaacgcactgctcaaagcgcggtttgtggccggtctcaccggcctgccggccatcgccgacgactccggactgattgtggacgtgatgggcaacgcgcctggcatcctgtccgcgcgctgggcgggggagcatggcaatgatccggcgaacaacgcgttgctactcgcccagctctccgacatcccggacgcggcgcgcacggcccgtttccgctgcgccgccgcactggccgtgccggattccgcggctcctgtggcgggcgggaggcacgccatcgtctccgaaaccgtcgaaatcggcgaaatgccggggcgcatcctgcgcgcggcgcgcggcgagcatggtttcggctacgacccgctgttcgtgccggacgaccagccggagcgggccgctgcggaccatccgctgaccagcgcggagatgaacgcggcggaaaagaacgcgatttcgcaccgcggcaaagccatcagggctctcgtgccggcggtcgaggcgctgttgcggtagaatcacgctctcaaaactcgcagatacaaaaacgggtttttgcggttttccgctattttccgccgtttccgcgaaatcggtgaaatcgtatctgcgagttttgagagcgcatgttcggcactcacgcgggaatcacgaaattcacgatggtcatcagcacgattgagatgaccgcggtgacggacagcgtgaacccggcgagcttcgcgttaccgagtacgcggtcggtgaacagtgtcgagaacacggccgtgggcgcgagcgacagcatcaccgccgtctttcgcacggatgcgtcgaacggcagaaggaaccagcaagcggccgcgaacagcacgccgagcggcaagcgccaaccgagcacccgcagcacgctgccgacatccttgccggtgcgcggcaaatccatcagcatgcccaccatgaacaccgagcagaacgagttcgcgtccgccaccggctgcagcagagtcggcacgaacgtcgggatgtgaatgctgaagagcatgaccacgatcatcagcagatacacgttgaacggcaccgaagtaaggaatcccttgaggatctgcttggccttcgcgcggcgggcgagcctgcgggcgtctttgtcccgtggcttcgaatagggaagtgtcggcgcggctcccgcacgctgttcggtgagcggccggtccatgtcgatgtgcagcagcgacgtcgtcatcacgtttgagccggcggtcacgatcacggaattgccgatgtcgaacatcgaggcggtgaccagcgccgaaggccccatgaacgcctggattacggggaagcagaaattgccgatgttgaatccggagcagttgagcatcaggaacgcgcggtccgcaacgggcttgtgtcgggtcgccgcatacaccagcagcagcggcagcaggccgaagacgatggcgaacaccgagatcagcagcatgctcagatgatgcgggttcgtggcgaacgagacgatgatggaggcgggaagcgtgaaatcgaacaccaccacctgcatgacgcgatagtcgcgtggcctgaacagtcccgcccgcttgaccagatacgcagcgacgatgatgagcagaaacgctatgggtttcagtatcgcggtcatgcttctctattccctgtggcgattgcggaggtatggttccgcgtgcgcgagaagggacttgaaccctcacgtcaaagacacaggaacctaaatcctgcgcgtctaccgatttcgccactcgcgcgtgccacccgtcgaaacggctggatatacaaaaccctaggcgcggagcctaggggtatggagccacttgacagaatcgaactgtcgacctgctcattacgagtgagccgctctaccgactgagctaaagtggcatgctgccgattcgttgatgaacctgcgcacaagaatgagactttactgtatgccgtggatttatgcaagttcggctggcatgtcgtgcgcgggcatgtcgtgtcggtcacggttgttcatcttgggtattttttgtttgtttctgtccgcttttgtgagtatcttggtaagcgaagtaaccggtgtggcccgccagcattggagagccgactccggcgtacagtgatgatgaaaggaccaataccatggccatcaatccgccagttgacgccaccaagacccccgagtgggccgcgctgcagaagcactatgacgagctgcaggccgagggcgtcagcctcaagcagtggttcgccgatgacgccgagcgcgtcgacaagctgtcgttcgacgccggcgacctgcacttcgacctgtccaagaacctgatcaagccggagaccctccagctgttcgccgacctcgccaaggccgtcaagctcgacgagcgcaccaaggcgatgtacaccggcgtgcacatcaacaacaccgaggaccgcgccgtgctgcacaccgcgctgcgccgcccggtcgaggacgagggcaagtacatcgtcgacggtcaggacactgtcaaggacgtgcgcgaggtgcttgaccgcatctacgccttcgccgacgaagtgcgttccggcaagtggaccggcgtgaccggcaagaagatcgagaccgtcgtcaacatcggcatcggcggctccgacctgggccccgtcatggtgtacgaggcgctcaagccctacgcggacgccggcatctccgcccgttacatctccaacatcgacccgaacgacctggccgagaagaccaagggcctcgacccggagaccaccctgttcatcatcgtctccaagaccttcaccacgctggagaccctgaccaacgcccgtgaggcccgcacctggctgctcgaagagctcaaggccaagggtgccatcgacggttccgacgagaagaacgccgaagccatcaagaagcacttcgtcgccgtctccaccaacctggagaaggtcgccgagttcggcatcgacccgaacaacgcgttcggcttctggaactgggtcggcggccgttactccgtcgactccgccgtcggcacctccctggccgtggtcttcggacctgcccgcttcgaggagttcctgcacggcttccacgagatcgacgaatacttcgccaacaccccgttcgagaagaacgtcgtcgtgctgctcggcatgctgaacgtgtggtaccgcaacttcttcaaggtcgcctcccacgccgtgctgccgtacgaccagtacctgcaccgcttcccggcctacctgcagcagctgaccatggaatccaacggcaagtccgtgcgctgggacggcacccccgtcacctccgagaccggcgagatcttctggggtgagcccggcaccaacggccagcacgccttctaccagctgatccaccagggcacccagctcatcccggccgacttcatcgcgttcgtcaacaccccgaacccgaccaaggacggcgaccaggacgtgcacgagctgttcctcggcaactacctcgcgcagaccaaggcgctggcattcggcaagaccgctgacgaggtccgcgccgaaggcaccccggaagagatcgttccggcccgcgtgttctccggcaaccgcccgaccacctcgatcttcggtgtggctctgaccccgttcgcgcttggcgagctcatcgccctgtacgagcacatcaccttcgttgagggtaccgtgtggggcctcgactcctacgaccagtggggcgtcgagctcggcaagcagctcgccaagcagatcaccccggccatctcccaggacgacgacgccctcgccgcccaggacgcctccacccagtccctgatcaagttctaccgcgccaaccgcgagttctgatctccgctcctgcgtcgcttcaatcagaactcgcggttggcgcgccgcgctgtgttgtttgatggtcggtctggcgaccgtccatggcgcgagttctgattcgtcggttcggctctagcagctgaccacatgaatacatgtgccccggcctcttcggatgccggggcacattgctatatattccgtgcgacgttatatctatgacctgtgaactggggtggtgttccgggtcaatgagatcagccgtgggaaaccgcttcattgcagtgttccttgcattttcatgcgcactctttggggtaatcgatacattttcatgaggaccttgtatttggggtgtcgggatatctgtgattgaccaccccccccagtctcgcttcgctcgacagtccccgggcttaacatcgtgggattggcctagcggggttgtgttgtggctgataagatggcgtcgattatgtcggattgggattcgggcaatgggagatggtggtgatgaaggcgcagaagagttgggatacgccggtcgccgatgagacccgcgatgtgagcgatgcctccgaggacattcacggcatcaccgatgacatcaccgacgacgccgaatccgccgaggtcgatgccgaggccgtcacactgctgcgcaaacggcaccgccggatgacgctgctggtcgtcgtggtcatcgtcgcatcgctggtgagtggattctgctggcggcgcagcctccagaccggctcccctgtcaactgttcgcaccagaccggagtcgcggacgagaaggactactgttatggcgggttcaagccgttgcagccgtccggccctcagctgggccgatcccaggccggcccgtatttcgcaaaggcggtgaaaggcacggccgcggcatacgacgccgtgcgcctcgccgcggtcggcggcgacaaggatgcggtgaacaagtccgccgccaaggcccgtgacctctcgcaacaggcggcggagaccctcgccgcccgcacctggccgaaatcactgaccaagcagatccgcatggtcatcatcgaatatcaggagcgcgcggcgatctataccaacctcgccggcaaccgcaacggcgaggcgatcgactggatggtgttcggcgaattcaggccatccggagcgcagcaggtaatccgcagcgcgctgaaactgcccgacgagccggagacggccgtcccgttcgacatacgggacattgccgacggcggagcctgcaagggactggagaccaccaaggacgtcggtcagcaggaagtcgaccggcactgtttcaccgtcaccgtgaccgaccaggtcccggccgagataacggggctgtccatcaaattcaatcttctgagcgaagacggcaccatccgcgagaccggcgtgagggccagctccgacatccagttcgatgacgatggcgacatcatcgagcacggcggcatccataagggggacacggtgaagctcaccatggaaatcgacccgaaactgctgcgcggcggcgaccgtttcgtgccgtcggcatggtatgtggaggacaaggcgggggagcagcacctcgcatcgttcactgcggtccaatcaggcggctatgacgtgctgaacgcgttcaaggtcaggtgacggcaatgtcagaacatgatttcgacggcgacgatgacatcttcagcaagtccggccggttcggcgggaacgccgagaaacgcaaggaccccgccaaaccaggcggcttcgggaaatccggcaatgcggggaagcccaaggactccaccgcatcttcggccggcgaaggcgacgcggaggcgatgcgccatctggagcacgagttcgccgcgatcgaccgcgaatcgcatcgcacggtggccgtcgtgttcgcggccatcgcggccgtggtggcgttgatcttcttcgggctccagatccgcgacaaaaccacgctgctgatattccatgacaacccgccgatcggctacctgccggtcagtgaatattcgctgcgacagccgtccacaggcaagccgatcagctcggcgcgcacatggcattaccccagccagtacacgattctcagcgacgacgccaccagcagcggcgtcaagcgcggcgcacggtgccgtatcgacaagagggattgcgatcatgcgctggtcacgtcccgcggcgtccagccgggcgacagctggggcgacttcgtgaagcgatacggcgacgtgaccgcgtacgagataacggtcgacgacaacgagagtggccgggacgattcgtacatgtccgatgaggaccaggccgcggcgtccgacctgcgcgagcaacacgggattaccatagacgatttcgaccgtgactatatacagaccggcaaggtcgacctgtcccggaaccggctgaccgtcaggttccgggcggtgctctacgacacgaccgtgctgtacaccgaggccgaccagtggggaggctatctcgactccacccaggaacggcattggcgtatcggtggccggtacggcacgatgttggcgccgaaccggcagagcttcaacctggaattcgagttcgccaacagcgcgacatgggaaggactgggcgatggtgacctgatcagcatctccagttcactgtacaactagcgaggttatgcatggcaaggttacacgacagtcggcacggttccgatgcggacggcatcgatgacgacgatatgccgctcacccatgagcaggccgtcgtcgaagccgacgccgaactccggcgtatgacttaccacccggtgcgcaaggcggtgggcatcgtcgtggcgatgggcgtcgccataggcgcgtcgctgggtgtcgggtatatgttcggcggcgatccgggcggcatcgtgaccgcgatcacgggcgtggtgtgcccgcaggacgccaaatacgccctggacggcgacgcgccgtttgtcaacacgtccgacacctcggagcatcccgccaagggggccaggctcagcgagaaggacgcggggcagtactatctggaagccgtcaagccgtcgatccagccgttgcgcgacgcgatgaacaccttgtacggcggtgatctgaaggccacgagggccgccgcgggaaaggccgccaccgtgctgcgcgccaccgccaaggcgctgcggtcacgcacctggcccgatgaggtcgccaatgcggcggccgtcgtcgccaacgaatacgacgccaaggcccggcaggcctcgtatgtcgccgactcggtcacgccgtccgccagcgacgagctgatctcgctcgatgcctacggcgtcagcgaagcggatgtctacctgcgcggcaagctcgggctgcccgccgccgaggcgccgtccgcgccgctggagatcacgggcatcgaggaccggggcatccagcagggggcggatgccggcgggtcgaccgtggacaccggaaagcgcatcatcgccgtgaccgtgcgcagccacgtgcccggcacgctcagcgggctgaacctgacgttcgatctcaagaagggcaagacgacgctcggacgcatcagcggaatcatggacgacatcgcgctcgccgaagggcaatccatcgtggttccggtccccgtcgatatcggcggggacgacggcgggattgccggcgccaccatgagctgggacagctggtcgttgaccgattggcgcggagaaagccatattgcggcggccagcgacgacttcgccgaatacgccccggacaaggtgatgggtacgttcacattgcggtagacgccggggccagaagcccgcgagcgaatttgtggtgaaggatacaggctccacaacatggcggactcgtccgctatgacaggaacacaggaatcgccggtccatgactcattctcgtcatgccggggattcaaatagccgatgaaggagcaggaaggttcctatgcaattcaagaaactcatcgccggcgtcgcggcggttgcggctgccttgggcggcatggccttggggaccatgacggtcaatgccgataccgatacgctcacagtgcccgaaacggccacgccgtcaaccattaccctgaacaaggccgatgatgccgatacatcgaaaagcacgtatacggcatatcgtatcgccgcgtacatcgacccggtcgcgaatgccgacgggcaagctgacttcctttggcctgaaggccgtggacagcgacaagtgggacggcaacattcgcgaggccatcgccgtggccggcaaggatgggcagaagctcgtcctgctgtacaacgccgtcgtcgccaaagccgccgtcgacgatcaggtgacgaactccgcgaccgccaattacaatggcggcgccgattccgaggccgccaccacggtcgtcaagctgggattcttcaccatgaagaagatcgacaagcagcacaacggcatcggcggcgccctgttctctgtcagcgacagcggcggcaacgccgtcgtcttcgagaagggctccgctaacggcagctgggtccgtgccgccgaccagagcgtcaaggtggacaacgtgacctacttcacgagtattccgaccaacgcaggcgggctttcccactggcgagccacgcggctgatcattcgcggcgggcagattcatgacgcggattcatgacggtcacgtttaatccacggcggtgatttgctcggcatcccatttgacgccgaggacctcgggcgtggtgactgtttcgatgctgctttcgatgtcgatgttgctgctcatgtgggtggcgacgacggtggtgatgaccaccagatcatcgggaagatccgaagccgcgatggactggacgatgaaaccgggctgatgcagggcgttgaacaccagcgcgcggatggcctgctcgtccttacgcaggcatttgacctcaagggtgtaacggatgccctcggcctcatgcgattgcgcggtgcgccgggcgtcgatggccgcgccgatcggccggagcatcatgttggcgagcatgatggcggtggccccgattgcggcggccgcttccatgccggagccgcacaacgtgccgaccgccgccgacgcccatagcgtggccgcggtgttgagcccggacacggacacaccctgcttgaggattacgcccgcgccgaggaagccgatgccggacgccacctgcgcggccacgcgcgtggggtctccggtgccggccgcgagcgtatagacgccaacagtggtgaacaggcaggaacccaacgacaccagcgcgttcgtgcggatgcccgcgctgcgtgcgcgcagctgccgttccaatccgatgagcgcgccgagcccgatgctgagcaggatgcgcagggttatggcgaacacctgtgatgtgacgattgcggtccagactgtcatgatcagttccttcgtttgaatggatgcgggagacggtggtggtacggggagaggatgataacgcgggggtgcccgcccggcgctcctgcggattccatcggttccgcaggagcgccgggcggtcagaagtcacagcagcggctgctgacggtgcagatacagggttctgacggcaagtaccgtcacggcataaccggcgatgacgatggcgagcagcgcgaacagcgacaccggaggtacgtggaaacccatccatgcgccgaccggcgtgaacggcagcgccgtggcgatagtcagcgccgcgagcgacgtgcagaccagcggcaccgacgcgcggctcccgatgaacgggacgcgttcggtgcgcagcatgtgcagtgccgtgatctgggtccacatcgacacgacgaaccatcccgtctggaacgcggcgacgaacagcagacgcgacccatccccgtgcagctccgggaacctcccgcctgcgacggccgggcagagcagggtgagcaacacggtgaaggtgaccatatcgaacagcgagctcaccggcccgaagcgactcatgaaccgggcgatagacgccgtgtcccaccgggcgggggagcgcaggacatcgccgtcgacgcggtcccatgggatcgcgagacaggccaggtcgtatatgaggttcagcagcaccatctgcacgggtgccatgggcacgaacggcaggaacgcgccggcgatcatcaccgagatgatattgccgaaattcgagctcagcgccagcttgatgtacttcatcatgttgacgcaggtgcgcctgctttgcgtgatgccgcgcagcagcacgtcgaggttcttgtgcgtgagcatgacatccgccgactgtcggacggcctcggagccggtgctggcgctgatggcgatttcgctggcgtgcatggccggcaggtcgttgacgccgtcgcccatgtatcccacgcaatgcccctcgcggcgcagcagtgagacgatacgcgccttatgctcgggagtgagcttggcgaacacgttcacgcggcgcagttcggtgccgagcgcggtgtccgtcatgtcgtccagcgttcggccggtgaccacccgtcgagcattgatgccgactttccgggcgacggtacgggccacttgtggctcgtcgccggtgagcatggtcacggtgatgccggcattgtgcatgtgggcgatcgtgtcggcggcatcgggcttgggcaggtccaggaaagtgaggtagcccagcagggtgagcgcgcggtcgtcctgcactgtggtctggtctgtcacagagcgctgcgccacgagcaggacgcggtatccgtgcgtcgccttgtcggccatcagccgctcatatgttccgcgcagtcgatcggtcagcggctctgcggttccattgcgcatgacggtgtcgcagcggggcagcatttcggagacggcgcccttgacgaccatgatgcggctgacgttcccggacgttccggcgccggcgccgctggtctcactgatatcgctgccacctgtgtgctcgcggtccgcgcggtgatggctcttcgcgacgatgacggtcgcccggcgtcgtatcggatcgaaaggcgtgcctccctcgacctgtacgtcgccggtatcgtttgccgagtcaccttcggctgcgacgatggcgtcatcccacggattgctcgtcgtgtggggaatcagtgtggtcagccatgccgcatgcagcacgtaggacgagttcaacccgctcatgctctgcgcccggtcgagcttgatgacgccgctggtaagtgtgccggtcttgtcgacgcacagcacgtccatgccgcccagcgtctcgatggcgtcgagccgcctgacgatggccttgccggaggccatcgtccgcgcgccccgggacaggcagacggtgacgatcagcggcagcatctccggcgtgagccccaccgccacggatacgccgaacagcagggcctgcagccagtcgccgctcgcgatgccggtgaccagcatggacacgggcacggtgaccgccgtgaacgccatcagcatccaggacgtggagttcatgccgcgctcgaagcgcgtgcgcggccgctgccattggaacgcgcgtgacagtccgccgaacagtgcgctgcggcctgtggcgatgacgactgccaacgcggaacccgaaatcaccatcgtgcccatgaacgccaggcacgccgcgtccgtcaacgcggtgtccctgtcgccggcggcgagcagggcggcagcatccttgcgcacgggcatgctttcgccagtgagcgcccccgtgcgatgcgcaggtctcggctctccagcagcttgcagtcggccgggacgatgtctccgacggacaacgtcacgatgtcgcccacgacaagctcttcggacggaatctgccgctcgccggcaccgacccgccgcaccgtcgccgtggtactcaccatggtggccagcgccgtcgcagcatgcgagcttcgggagtcgtgcacgtatcagatcagaccggacaccaccatgagcaggatgatgcccgcggtcaccggcgtgccggtatggtgttgccgccgtaagcccgacgcgcccggcgaacctcgtcgggttccaagccggattcgtgcgcatacaccaaggcgagcgtggcctctggcgtggcatgggcggcgaaattcagtcgctgggtgatgctggcgtggcgttcgccgcgccagcgtatcagtcgtagcgtgttcatgattcctccttggcgattcggggcggtccgttccgctgtcgggttgatcgttgtttccattgcggcagttggctgaggcgggtcaactcagtccgtttcgctggcttcctcggccggtcgggtggcgtttgccgggttggcggcgtcgacggtgatgatgtcgtcatcggcgtcgtagtcgaacagttctccgtatcgaccccacgtcatggcgatgttgaactggcgctccgcctccgcgtccgtatgacgggccctcagcaggtcgacgatgagctcgccgcgcaggcggccgtgttcgctgtgacggaccgctcggtcgatgatgcgcaccagcggtgccttgtcttgcagcatggcggcgaacatcgtcttgcttgtcagaatgtccgcctgcctccactggcgtccgagctcggtcaatgtcacgtgtccgttctcgacggtcagtaatcccagcatggttccggcgtcgatcagcgggaacaggtcgtccacctcgaatgacagctcgtcggccagatcggccaggtcgatgccctgcgcgtgatcgtatacgatctccaccagtccggccaggcctcccggcgtagcgttgggcagcatgtcggaggatgcctgatggtcggcgtcgctcgcccgggccggggcctgatccgctgccgcggtctggttcgccgcgccatctgacgtgccatgcgcgacgccgtccccggcggccgtgcgctcgtcggcggtatccgccggcccgccatcacgactctgcccggtcaggatcgcatacagggtgtcgaccatagcctcgaactgggcggaatgacggtcgcggggcctcggcagggtgacgggcatgtcggcgatgagatgaccgggatgcgagccgagcaccacgacacgatccgccatctgcacggcctcctcgatgttgtgcgtcacgatgagcaccgacttgatggaacgctgattgccgctccacatcttgagcacctcgttgcgcaggttctcggccgtcatccaatgcggagaacggctcgtccatgaacagcgcatcgggctgcaccaccagggcccgtgcgatgcccacgcgctggcgcatgccgccggagagctccttcgggtacgcgttctcgaatccgtccagtccgatggcgtcgatggcctgcagtgcagcgcgacggcgttcctcgcgcggcacgccgcgggcctccagccccagttccacattcgcttgcaccgtgagccacggcatcagcgcgaaggtctggaacacgagtcccactccgggattagggccggtgatgtcggtgccgcggtaggtgacggtaccgctcgacgcgggtaccaggcccgccaggatgcgcaggaacgtggattttccagcgccggaccggcccaggatcgccacgatctcgccctcatgcagggtgaaggagatgtcgcgcagcacggtcagctccttaccgcgcttggcacggtaggtcttgcccacgtgctgcgcctcgatgatcgcggtgctggcggcgttcgtcgcggcggtctgcgggaagattgcggtgcggtcggaaaaagttgcgatggtcatgataaatggtccttgctgttacgtttttttgcggatgatcgcggcggattcgaatgacatgcgctcgccgccgatgctgttggattgttgcgggtcgatgggccgggacggccggtgcggcttccgtcaggcgacagagaaacggcgctcggcgtacgtctgcaatggacgccagaacagccggttgacgcccacgacgaacacgctcatcacggcaaccccgatgatggtcttgccggtgtctcccactgcggtcgcattggcgatatatgttcccagtccatttgccgtaagcgtggtgtgcccgtaggccacgatctcggagacgatggaggcgttccatgcgccgcccgccgcggtgatgccgccagtgcaccacgagccgaacaccgccggcaggatcagcttggtccaccgctgccgcgtgtccagatggaacgcccgcgtggcctcgcgcaggtcatcgggaatggccgaagagcccgcaatcacgttgaacaggatgtaccactgcgttcccagcgacatgagcagaatgctgccccagctgatgtcgatatgccaggcgatgaaccacagtgtgacgaatgggaacgtgaagttcgaggggaagctcgccaacacctgcaccagcggctgcacgaaccgggaaatccgcggattcatgccgatcttcacgccgatcggcacccagatgatggagcacaccacggtcagcagcgtcacgcgcatgaacgtgatcagtcccaggaccatcgcgtggccgacctcggcgaacccctcgccgtccgagatgaaacgccccagcatccacaggccggccaggcaggccacagccatgagcgccataaacgcgatgtcgagtgtgcgacgccgggtgccggcggccggccagcgtgcgccggtacggcccagcgggcgagtcagccagaacatcagatcggcgatgggccggcccacgagagccagcgcatccgaaatgccggaacgccgcagaatcgacagcaccagactcgtcttgtcctgcacggactcgttctgcgtgatgcggaacttctcggcccacgccgtcagcggcttccacagcagcacgtcgataagcagcaccacgatgaccatggtcacgatggcccacagcaccttgcccagctgttcgtgctcggacgccaccgccacgaagctgccgaggccgggcagtgcgtacgtcctgttgttcacggagatcatctccgaggccgtcaggaagaaccagccgccgccgacgctcatcatgcagttccatagcagcggaatcatcgaattcggcacgtcgagcttccagaaacgctgccagcgcgtgagctgcatggaacgagccgcctcatccaactcctgcggttcgctgagcagcgaatggtagaaggagaaggtcatgttccatgcctggctggtgaagatcgcgaagatcgatgccgcctccacgccgagaatggagccggggaacaacaccatccaaatggtgaccgtggcggacaggaagccgaggatcggcaccgactgcaggatgtcgagcagcggtatcagcaccatgcgcagtcgccggcatcgggccgccgccaaaccatagatgaagctgaacaccagtgacaaaaacagcgcgatgaacatgcggaacaccgaacgcagcgcgtaatacggcagcagatgcaaatcgtcgctcaccgtgctcggcacacctgacgggccgatcggttcgttgatttgcggcagcagccaggcgacgacgccgaacagagcgagcacgcccgcggccaccaccacgtctgcggcgatgcggcgcacggcgccgctgcgggacatgtcggcggtgtcggcgccggaacgcggacgaatgccggggaacgaggagtaattgaagaagttggacataacggaacctgtgcgctctcatgtcgttatctcgaaggagataaacggttcccgttcggtgggcgttcgactcggtatccgtgcggtaagtgcgcgccatgggcgtcagcggtcgcgtgcaggcgcgccgatatgcgggtatgtctgcatgcagatagccgatcggcgtcgtcatatgatgatgccgatatgccgggagtccggagaacgggatgtggattcgcgattcaggcgttcggcgcgtacgtcatgcgggatgtcgcagccgtcgtgaggcggtgaagtcgatgcgagccgaatcagtcagtgatcggatcgccctcgccggatacggcggtgtcgtgacggacggccaatgccatggtcgcggtacaaacgtgtgaagagaatgggccgtatgctgcgcccgatggcatgtgatattgtccgccatcgcgcagccggctactatgacctaaatcgccgtccatgacattcacctcctcaatggaaccagtgcgccgtcggacattgacgacatgaggaagtgcgacttctcgaagagttgcccctagtcgtgtcatcgttcaagcttcagcatcgcagggcggtggagttgcgttagttcatgccttaatccgacaagaactgctgacctgcgtgcagtgtctccactgttagcggcagcaacccatatccctgcggtagcctcgcctaccgacgctctcagggtaaaaccgccggcagaccatgtcaactccgtagtgtcgcgcccaaactgcgccgggccatatcctgccccgccggcggggcaggatcggatggatgtcaggcgagcaggctttcggctgtggcttggtcggtggcgagggcggaaatatagctgccgaccaggcaggccttgatggccttgactttttcctgccccccatgccacgccgatgaccagcgcgatgcgcttcaggcgatcgagctccaccgaaatgatgcggtcggacagctccgaacatacgggccttccctgcgcgtcgatgaagtgcccacatacggtggcgaccgcgccctgcgcccggatttccttgaccatgtgtggtgtgacataggcgtcgaacaccggactgaggcggtcgccttcggtcgcaccgaccccttccagggccacgtcggcgccgccgccgagcgccagcgcggtggcgatttgcggctcctggcgcatggccgcggcgatatgggcggaggagaggatcatcggtacgtggagtgtggtgacggtgccgccgaggcgttcggcgagcatgcggcagatgtcgggcgaatccgtcatcgtattgctgggggagagggcgcccaccatctgcgccacattggatttcggccagtcctggatggcgacttcgcggaccgtggcggcgacggcccgtccgttggagacggtgatgagcgagtcgggcgacgacttttcggtaagcagggccgcggcatatcgggggacgatggtgctgggatcctgcccgggattgacctgcgccactcgtgcgcatttcaacccgtaccgtcttaccagcgcgtcctccagctgcatcagacgttcgagtggatgcccgatctcgatgcgtaccatgccccggtcgcgcgattcgctgagcagccgcgagatggtgggacgggagtatccaatctgcgcggcaatctgcgcctgcgtcagattgtccgtgtaatacatgcgagcgattttcagcacgagctcgatgtggtttcgcgactcagttgtcgtcattgtcagcttgtttgcaaccatggcattattctattccatccggtgtgaccggtgaacatatgttagtttttccagtgcagcaacgatgctgaacaattgttcagagcgcgaaagaactcaatgaatccttgatatgtgagcgctctcaattgattgcaaaagagaaggtcgattacatgtgctcactcagctctcatgtgttcgatgaacatgtgttcatcgcgtgggtggtgtgcaagacctttccgccgttagctagaggctgtcgacgcgcagggctcatcgaagaccgacgccgacggaaagtgcggggcaacaacgcagagcagcgggcgaagcagcctgcctcgtgcacgggaaaggaacattatggaaatcatcaacaccatcatcggcctgggcgcctcggtgatgatgccgatcatcttcttcgtggtcggactcatcttccgcatgggaatcggcaaatcctttaaggccggcatgaccgtcggcgtcggcttcgtcggcgtcaatatggtcatcaacctgctgcttgacaacctcggccccgcctcgaaggcgatggtcaaccgcctcggcctgcacctgactacggttgacgtgggctggcccaccgcctcgacggtcggctggggcacgccgatcatggtcgccacggtcgtcggcttcctcgtcatcaacgccatcatggtgttctgcaagctcaccaagaccatcgacgtcgacatcttcaactactggatcttcctgcaagtcggagcgctggtctatgccgtcaccggcaacttctggttcgccgtcatcttcacctgggtcatcttcgccatcgtgctgaaggtcgctgacctcaccgcgccttacatccagaaggaatacaacctcgaaggcatctcgttcccgcaccttgccggtctggcctggtcgccgctcgccatcgccgtcaactggatcatcgacaagatccccggccttaagaacgtcgacttcaacgccgacaagatccgcaagcgcttcggcgccatcggtgagcccgtggtcatcggtttcatcctcggtctgctcatcggcgtgctcgccggctacagccctgacaagtccgtgacgctcgccatcaacatcgccgcggccatggtgctgctgcccaagatgatcgacgtgctgatcgaaggcctgatttccgtgcgtgacgccgccgagaagcagctcaagatctggttccccaaccgcgagttctacatcggcatggataccgcgctgctcatcggcgactcctctgtgctcgccaccggtctgctgctcatcccgatcaccattctgctcgccttcatcctgcccggcaacgagatgctcccgttcgccgacctcgcgtcgctcgtgttcatcctcgcgctggtcaccccgttcgtgcgccgcaacatgttcaagatgctgatcgtcggcacgctgagcgtcatcatcatcctctacgtcggcaccgatatcgcgccctgggtcactcaatcgttcacgcagagcaacatcgacctgcccaaggacttcaccgccgtcaccaacatgaccggcgcagtgagcacatggattggctgggtcgccgtcaagatcggcgaactgttcaacatgatcgcctgagcggctgcgatatcatcggcacatattcaataaggaatcatcatgacaaacgcaacgaagcatttcctcaccattgacaatggcggaaccaacaccaaggtcatcatcgtcgaccaggatggccggcaactgtccgtctcgtcgttcccgaccgacgccatcgagcggcgtcccggcttccgcgaagtcaaccccggccagatgtggcgtgacatcggcaaggcggtcaaggccgcgctggaatccgccggactggatggaagccagatcgacggcgtcgtaccggtcggccacggcaaggggctgtacgtgctcggcaaggacggcaagccgttcatggacggcatcctctcctccgacagccgcgccgcggacctggccaacgaattcgagagccgcgtcgccgaaatctacccgatcagtcaccagcacgtcatggtcatgcagttcccggtactgctgcgctggctgaaggacaacgagccggaacagtacgcgcggatcgggcatgtgctgtccaacaaggacttcatccggcacttcctgaccggcgagatcctcgaggagcgtggcgacgcctccggcaacaatctggtcaacctcgaaaccggtgaatatgacagccggctgttcgacttcttcggcatcccggaaatgctgaaatgcatgccgaagctcgtcagcgcgaccgaccgctgcggatccatcaccgccgaagcggcggcgaacaccggcctcgccgaaggcactcccgtgtatgccggactattcgacatcgacgcctgcgcgctcgccaccggcgtgctgagcgacgatatcttcagcatcaccgctggaacgtggaacatcaacgtgttccccagcaagaccatggcgccgctcgacggcggctgcatgaactccgtgttccccaccggtggcaccttggtcgaggcgtccagcccgacctccgccggcaacctcgactacgtgttgcgcatgatgacggcagacggctccaaagccgccagctacgacgaactcggagcgatgctggaacgtaccgacgccaagtacaccgacgtgctgttcttcccgttcctctacggcagcaacgtgaacctgggtgcggaaggcgcgttcatcggactgcgcagctccagcgagcgcgaccagctgttgcgggccgtgtacgagggcgtggtattcgcccaccgccaccatgtcgagcagctgctgcgcgtgctcgggcacaagccgaaggccatccgcatctccggtggcgtatgcaattctgatccttgggtgcagatgttcgccgacgtgctcaacctgccggtcgagaccgtggccgtaaccgaactgggcggtcttggcggtgccatgtgcgcggcggtcggatcaggcctgtacgggtcgttccaggaggcgttcgacaacatgtcgaagctcgccaagcggttcgagccgcacgcggaccagaccgcggtgtatgaccgcaagttcgaggcgtatgagacgctgctgaccgcactcgacggcggatgggccgcgctgcgtgacatgcagaactcgctggagcgctgacatggtcaccaacgcgctgggaatatatgaaaaggcactgccgcgcggcctgagctgggagcagacgttcgatctggtgcatgagctgggatacaacttccttgaattctcggtcgacgaaagcgacgagcgactggcccgtcttgactggaccgagcatgaccgggcacggttccgcgacgccatgtggcgcacccacagccgcatcaacaccatgatgctctccggtcacaggcggttcccgctcgggtcaaaagaccccaaggtgcgcgagaaggcgctcgacatgatgcgcaaggcgatcgacctcgccgtcgatctgggcatccgcaacatccaactcgccggatacgacgtgtattacgagccgaaaaccctgctgtctcgcgaatacttcgtcgagaacctgcgcaaatgcgtcgacatggccgcgaagaaactggtgatgctctccatcgagacgatggacgacccgttcatcaactcgctggacaaggtcgcctattacaagtcgcaagtgcgcagtccatggctgcaggcgtacccggatgtgggcaacctcacggcttggcccaccaacgatgtggggcgcgagatcgaatccaacatcgacaacatcgtcgccgtgcacctcaaggacaccaagccggtgggcgagacctcgaaaggcgtgttcaaacgggtgcccttcggtgaggggacggtcgacttcgaggcgtgcctgcgtatcttcaaacgactgggataccagggcagctacacggtcgagatgtggaccgatgagtcgccggatccggtggccgaggtgactcgggccaaaaagatgttcgacgggctgttcgacgtggtgggcatcgaacaggagccgatcgccggcatcggagaatactgagcccgctcgtgggtgccggcgcggcgcgccggcaccgcctttgatgaacgtcccgatatataagtgcgaataagaaaagtgagtggtgattatggtttcgttggctgattttggtcctgaggttcgtgctgaggtcaagcaggtgcgtgaggtcgtggcggccttgcatcagcagctgatcaagtggaacctggtggtgtggacggcgggtaatgtgtctcagcgtctgcattcggcggatctgatggtgatcaagccgtcgggtctgcgctacgagtacctgacgccgtcgagcatggtggtgtgcgatctggacggaaacgtggtggatggggcggaggcgccttcgtcggatacggcgtcgcacgcgtacatctaccgcaacatgccggacgtgtacggcgtggtgcacacgcattcgacgtacgcgacggcgtgggcggcgacgggtcagaacatcccgtgcggcctgacgatgatgggtgacgagttcggcggtccggtgccggtgggcccgttccgtctgatcggctcggaggcgatcggcaagggcgtggtggagaccctgaagaagtatccgaagtcgcaggcggtgctgatgcagaaccacggtccgttcacgatcggcaaggatgcggaggccgcggtgaaggccgcggcgatgacggaggaggtggctcatacgatgtgggccgcccgtcagttgggtgacatcatcgagatcggccaggcggacatcgacaagctgaacgaccgttaccagaacgtgtacggccagcactgacgacggggcacatgaggggattgtgatttggtttcgactgcgagcgaggtatgggggtctgtgcttgtgacatgcccggagtgcgtagcacaatcgtcgcggttcaatatcgcgattggctttatcgcaccattcgcatggcgatacccaacaattgtgctgcacactccgggcgtgtcggttcgttccgtcggctgaacgggaggcttccgttacggagcccggccgaagttgaggtcaattccgtctcgtccatatgaatcaataaaatgttgttttgctgtgtcgagggtcggccgccgcataagccgcctcttcatgagtccagaccgaacgggcgcaaagccgctgtttcggcggattgacaggcttcctgagggcagacccgagggagttacagacgtgttcgtgatgccagtcatcaccgaaccccaaaccaatgcgctgatatgcggcagcgactaaggaatagcaatggttaacgctgttgaggcatttgacgccaagcacatgaagcccgccgaggagatcccggcgttccgtcccggcgacaccgtcgacgtcaacgtcaagatcaaggaaggcaacaactcccgtatccagaccttcactggtgtggtgatcgctcgtcagggctccggcctgcgcgagaccttcctggtccgcaagatcagcttcggcaccggcgtggagcgtcgcttcccgctgcactccccgtccatcgactccatcaagctggtgcgcaagggccgcgtgcgtcgcgcgaagctgtactacctgcgcaagctgcgcggcaaggcggctcgcatcgtcgagcgtcgcgacaactccgccaaggcgactcaggcctgagttttgccaagtgaggcgacagtaccgtgaaattcagcccggagccgattggttccgggctgaatttataggaacgccgctagtatagttggggtttcatgtatgcgtgatggaggaactatgcggccagacaaccatcggacggatcgggccatgcccggttccggtaccgaattcagccgggacgaatggatcgtcgccatagccgatcatggcgtggaccccaccgatatgccggggcgggtagtgggcaccgacggccgagactcgttggcccgccgcaggaaaggcgcccatcgcaagacctcgcctaagcgcaacaatgattcgttctcgttccgtgacctgctgatctggtgcgtcgtccccttcgtggcggtactgctggtacgcatcttcctgatcggcttttacgtgattccgtccggatcgatgcgcgataccatcgagatcggcgaccgggtcatcacgtcgaagctcacgccgaaatatttcgatctcaaacgcggcgatatcgtcgtgttccacgaccccgcgaactggctgaaccaggagaccaccagaggcaaaggcgattatctcatcaaacgcctgatcggcttgccgggcgacgtggtcgagtgcggcggtgccgggcagccggtcaagatcaacggcgtcgcgattgacgagacgtcatacatcaaatccggcgtcgacccgagcagtttctcgttccgtgtcgaggtgaccgccgggcatattttcgtcatgggggataaccgcgccagctcagccgactcccgataccatcaggacgacggtgatcatggcttggtgcccatcgacaatgtggtcggagtgggactgatgcggtattggccgctgaaccggatgagtttcctgagctcccatcatgatgtgttcaaggacgttcccgccggcaaggcgcagtgacatcagacggatggtgatatggcgatgatcgaacatccgacgcttgatatggagcggcagcttgccgcccaaggctgcgatgtggtgatcggctgcgatgaggtcgggcgcggggcgctggccggtccggtcatggtcggggcggccgccatgtggtcacgtgacctcgccgccgcgcaagtgccggccggtgtcgccgattccaaattgctgaccgagcacaggcgcgaaggaatcgtcgacgagttgcgttcgtggtgcgccgcttacgcggtaggtcaggcgagtaacgccgaaatcgacgagtggggcatatcgcatgcgttgggcatcgccgccttgcgggcgctcaacgatgtggagcggcagctcggcatggacgggccggccggttcgggtcgtcgcgtggacgtcatcctggacggtccgaacgattacattaccaagacgatgaacacgtttgacgcgccggcgttgccgattccggtacaggtgtcgtgcaaggtcaagggcgaccgtcattgtgcgaccgtctcctgcgcggcggtcatcgcgaaggtgacgagggaccacctgatggttgacatcgcgcagggcaatccgcggtacgcaccgtacggctgggcgcacaacaggggatacggctcggcggctcaccgcgacgccatcgcccgtctgggagtcacgccgctgcatcgggtcacgtggcatctgacctgattgcggcgttgcggctgattccgggcctgcgccgcgcagctcggcatggcgcggcttaatttggctcggcccggttacttgactcggtgctttgtctcaggtgcgggcgctgtagtgccacagttctttgtgagaagaagtccggggcgtgaatccgaacagcgcagtggtgaatctgttacctgcgcatgatttgtgagcgctcacgtgtgttatttaagcgttaccgggtagacttgcccatattgtgttgttatgcagcgggaggtttgacagcgtgacggccaagcgaagcgggcggaaacgcccatccatgttcgaagtcgcgaagctcgccggagtcagtcatcagacggtgtcccgggtcatcaacgattctcccgatgtctccgacgccacccgcaccaaagtgcaggatgccatcaaggcgctcgattatcgtcccagcaactcggcgcgagcgctcgcatcgcaccgttcccgcacgatcggcctgatcgcaggcggcatgaagttctacggccctatttcggcgatttccgcgatcgagatgatggcgcgcaagcacggcctgttcatgtcggtgatgatggtgcatgaggcgctgtgcacgcaggcggagttcgaggacctgtgcggcacgttcaacgagcagaacgtcgacgcgttcatcatgctcgcgcccaccgatgtcatgttcgaagaggcctgctgcacgcagctgacgcagcctcgcgtgatgatcacctccacgcacggcgaactcagcgtgaacgaagggctgcgcctgattcatccgcgcgagcgcgaccgcgtgtcgatcgtcggtatcgaccagtggcgtgcgatggacgatgtggtgcgcatgctgaccgaatacggtcacaagcgggcgttgtacttcgccggtccgttggggtggcgcggtgcgatgacgcgactggatgcctgggtgaaactgacccgcgcccgctccatcagttccgtcacggtgcgttgcaagacctgggagtcgaccgaggcgtacgccaggatgaaccatattctcgattccatcggcaatcagggcggcaagttgccgacggtcgtggtcacggcaaacgacaatcaggcggtgggcgtcgcgcgtgccctgtatgagcacggtgttcgcattccacgtgacgtcagtctggtcgggttcgatgacatgccggcgatggacaacatgattccgcctctgaccacggttcggcctgattttgaggcgttgggcgtcgctgcgatgcggcaggtgctgcatctgctgggggaaggtgacgaagtggcgttgcccgcgtccgcacatggtgtcggtctgctccccgcagaagtcgtgaagcgttcgtcgctcggccccgccgccaaccgctgaccgaggatcgcgcgttcttcttgggtctgttagaccaacgtgttggttttgatttgtaaagtagctacatggtacgtgcaatgaagctatgggtaggcgtagcaaggcagtgaaactggtcggcggagtccggggcggactcgcgctgctggatgatgacgagcgtcgtcgggtgattgaggcgagcgaacgagatattgacgacggcgtcggcttttttcgcggcacggctcggcccggcacggcgttgatggtcgcgtacgtcgacgagttcagggaccgtttcagggccgggatcggccgcggccgggtgacgagcgtcatgcgggaaccgggaatccgcggcgtgcgccgcggtgggacgcccgtcaccgccagaccggcgaggggcgcgggcggcgggcccggcctcgtggaacgcgggttcgaggcgggggcgccgaaccggccacaccggtcctcgggctaccggacaccgggacggaccgaaaccgggtattacgcgaaccaagcggcgcaagccgttccactataagagcggaacgttgataatggttatgccggtttagctgaccggcgataatgaaggatgatggacggtgcggtgaccccgggcggaactgacgattccttggaacctgtcctgtttttgatttgtcccgcgccgcccaccgacccgatggccatggaacatgacctcataggagcgtggttgctccatcggttcccagcaagaccatggtagcgtgccccgtcaacgttctgtctgtgccggaagccatcggcaacggcatcgcgacaaacgcatgaaaggaccgacgatgaagtcgactataccaacgatcctcgccggagtggatacgcattcaacaacccacacactggccctgctcgacgaacacgggcgggtgaccgacaccgagaccttcaatgcggacccgaagggctacgaacggctgatcgccatgataggtgacccggccctgtgcctgggcgtgggcgtcgagggcaccaactcgtacggtgccgcgctctcgcgcaggctcgccgcagccggctacaccgtgcacgaggtgctgcggccgaaacgcagcgtgcgccgcagcgacggcaagtccgatcccatcgacgccatagccgccgccagaagcgtgctcgccggcgatgggatcagcacgcccaaggcatccgacggttggtgcgaggcgttgcgccacctgatcgctgcacgcgagcagctcgtcacctccatgacggccatatcgaactgtcttgccgggttgctcaccaccgctccggaaggaatcagggagaggtaccggtcgctgccgtccaagagacggatcggcaagctcgcggcctgccgtccctccggtggcatcgtcgagcggaacgtgctctcatcgctgaagacgctggcgtcgtcatggcgcgaactgcacgacagggccgatgtgctggagtgccgcatgcgccagattctggaagagaacgcgcgtcccctgctcgacgtgtactgcatgggcaccatgtcggcggcccaactggccgtcatcggcggcgacaacccggaacgaatccgctccgaggcggcgttcgccaagctctgcggcgcctgcccgctgcctgcatccagcggcaagaccaaccggcaccggttgaacagatccggtaaccgtcagggcaaccgggccctgtataacgtcgccctggtgcgcatgagccaccaccaacccaccaaggactacgtggtaaggaaaaccaaggagggaaagggcaaactcgagatcatgcggtgtctcaagcgctacatcgcccgcgaggcctaccgggcgctcatcgcgatccgcaacggcgaagccggacgcgaacccgccgtcgaacgcggggccaggctgagggaagtgcgcgtctcgctcggcaaaacccagcaacaggtcggcgacgcgttgggcgtgccgtccagccgcgtcagcgagatcgaacgtggggttcgggatctgcccgaactcgaacgacaaatcatcgagtggatggactcaatcctcgggcaaagccaacactccaacacatttgacaatgtataggagcatcaaaaacaggccatatcaatgtgccagacggcacgttcgcaccacccctcgttcggttatgcggcccggtggtcagcgcttgccggcgtacagctcctggtcgatcgcgccggagaacacgtggttcacagccggacgcacgaccttcagcgacggcgtcaggcaggagttcttctgggtgaactgcgcatccagcaccacgaacttgcgcaccgattcggcgcgcgagaccgtcgcgttcgcgcggtcgacgaacggctggatctcctcgcgcacctgcgggagcgcggccgcgtcggccagcgacgagtcggccggttgaccgatggtcggcagccacgacgccagaccttccgggtcaagcgtcaccaaggcgccgatgaacggacgcccgtcacccacgaccacggcgtgctcgacgatcgggcacttggcgatctcctcctccatcgggatgggggagacgttcttgccgccggcggtgatgatgatgtccttcttgcggccggttatcataagccggccgtcctcgtcgagcgagccgaggtcgccggtcttgagccagccgtcggcggtgaacgtttcggcggtcttctcggggagattgtgatagccgcggaacacgttcgcgccgcgcacctgcacctcgccgtcgtccgcgatgcgcaccgacgagccgggggcgggctggccgaccgtgccgatcttgttgtcgttcacgcgtgtcaccgtaaacggcgccgcggtctccgtcataccgtatccctggatcatcggcaggccgatgccggcgaagaagtgcgccagatcggcgctcagcggagccccgccgcacgccacataccggatgttcgggccgagtgcgccgcgaaccgcgcggtacaccgatgtctcgaacatcgcgtgccgggcgcgctggctggcggaatgcttgcctccgtcctgctcggtgcgcgaccattcacgggcgcactgggcggcctgcgcgaatatgcgccccctgaaaccggtgccggccttgcgtgacgcggcgttgtacaccttctcgaacacgcgcggcacgccgagcagataggtcggcttgaacgagcgcaggtcgggaagcagagacttcgtatccggcagatagccgaccacgccatcgtcggagccaatcgagcagtactggatgtaccgtgcgaagcagtgggcgaggggcaggaacagcagcagccgtggatggttgtcgcacagcacctcgccgaggcactcgtatccggctcgaaccaccgacaggaaattgcggtgcgtaagctccacgcctttcggggcgccggtcgagccggacgtatacacgatagtggcgaggtcgtcggcatgggtgtcggcgatgcgcgcctccagctcctcgtcggagaccgacacgcccaatccctccaaagcgcccagcgcgttgccgtccatcatgaggatgcgctgcaggccggggcatcggtcgttgatcgaatcgagacggtcatagcgttcgcggttatcggtgacggcgagcttcacgccggagtcgttgatgatgcgctccgcctgtgccgcggaatcggtgtcgtagaccggcacgttcaccgcgccgatcgcggcgagcgcgaaatccagcacgccccactcgaagcgggtggcggagaacagcgtcaccgcgtctcccttgccgacgccgaacgcgatgaggcccttcgctgcggcgagcaccagacggtggaactcgccggtggtgatgctcgaccacgcgcccgggccggtcttgcgcgccgcgatggtggtcgcattgccggtgcgggcgatgcgttcggtgagcagcgagtacagtgtctcgtcgtcgttcacggtgacgtcgccgggggaggtgtattcgctgatgatggtcggaacggcagcggtgccgaccggccgcgcggccggtgccgtcatgctgggtgccggttcatccgccggcttggcggcttgggccgcgttcgactgatcctgtgcctgatcctgtggcatcgtggatttcctttgcagatgtcctgatacgtattccatcgtcaagggtacgttgccgtaggttcctgcggtgttgtgcatgggcacgaaaagcggtgtcgggttttgtcgtcgcgcacaaccgcgcggcgcaggccggcggcggcgcgcggtggcggacgtcgggcggacggtgttcccgcgcggcggtgcagcatggccggctgataacggattataggttttccttatcgccggaaatgagccgctgcgcgtgttcgcggcgggaacgcctctagcatggtgccttgtgcgccgccgacgcatcccggggatgtgcgggcggtcgaggcaacgacaacaatggcaatatagacaatacagtagcggcaacaatgacggcgatggcggcagtcgtcgcggcggccatcgccgcagcatatggaaggagaaccctcaatggctgaaaaccgatcggaactgaacaagaacctggcgcagatgctcaagggcggcgtgatcatggacgtgacgactcccgagcaggctcgggtcgccgaggacgccggcgcgtgcgcggtcatggcgttggagcgcatccccgctgatatccgtgccgccggcggcgtctcgcgtatgagcgacccggccatgatcaagggcattcaggaggccgtctccattccggtcatggcgaaggtgcgcatcgggcacatcgctgaagcccgcatcctgcaggccatcgacatcgactacatcgacgagtccgaagtgctttcgccggccgatgacgtctatcacatcgacaagacacagttcgacgtgccgttcgtgtgcggtgcgaagaacctgggtgaggcgctgcgccgcatcgccgagggggccgcgatgattcgcaccaagggcgagcccggcaccggtgacgtgatccaggccgtgcgtcacatgcgcacgatgaacaagcagattcgcgagctcgtcggcctgcgtgacgacgaggtgttcgaggccgccaagcagctggccgtgccggtcgagctggcgcgttacgtgcacgacaacggccgactgccggtcgtgaacttcgccgccggtggcgtggccaccccggccgacgcggcgctgatgatggagctcggtgccgaaggcgtgttcgtcggttccggcatcttcaagtccggcgacccggccaagcgtgccgccgccatcgtcaaggccaccgccaactggcaggacgccgatctgctggcacgactctccgagaacctcggcgaggccatggtcggcatcaacgaggacgaaatccagaccatcatggccgcccgcggcgagtgatcatagcccgctagcggcgggacgatcgagccgtccctcccgctggcgaaggcggtcaacttggcgggggtgattccgcatgaattcgcccccgctggcggcgagggctgtcgcggggcgactggggtggtagaggcgcatcctcagtcaccccacccctccccgccgcattcgacggctcccctcatcgggagccaaggagtaatcatggttgtagctgttgaatatatttcgaaggaagagtcggccggtgccgagacggcaaagcacggcgtgaccggcatcctggccgtacagggcgcgttcgcagagcacgctgcgatgctcgacaagctcggcgcccagtggaagctgctgcgtgccgccgaggatttcgacgattccatcgaccgcgtgattctgcccggcggcgagtcgaccacacagggcaagctgctgcgctccaccggtctgttcgagccgatcgccgcgcacatcgccgccggcaagccggtgttcggcacgtgcgccggaatgattctgctcgcgaagcgactggaaaacgacgacaacgtgtacttcggcgccctcgacgccacggttcgccgcaacgcttacggtcggcagctcggttcgttcgcctccacagccgatttcggtgacatcaaggactttccgctcgtgttcatccgtgggccgttcgtctccgatgtcggggcggacgccacgatcgagaccgaggttgatgggcgtgtggtcggtctgcgacagggcaacattctcgccacggccttccaccccgaactcaccgacgacacccgcattcacgagttatttttgagcctgtaggctcccgctagcggatcgggctgcttgtcggcggggaacggcagtgagaccagcgggctggtcatgcatggcatgtccgtaactgcagggtcgagggctgttcgcgaaggtgactggggtggccgaggactttcggggtatcatccgcagctcggcgtctcgatttttggccgagacagcaggtcgccacgtcccttcgtttcgtagttgtgccacaccagcgtgattttgcccgatttggccgtggtgtggccacgccgatggccacaccagctcgtgcaaacgtttacatgacttggtgtggtacatgatgtcattcgttttccttgaaatatcaaggaaaacgggattcgactccaaaccggtatcgggcgcgtgtaccacagaaggccgaaaagaggcaaaaagccctagtgtggtacaggctttgcgatgtcgtgtgcgtcgtatgacccacaaatcgccggatggtgccatctgtcgacacgataagcttatgtcaacgttgtcatgccatatcgttcggcgcttccgaatgggactttcgaggggtgaaagatgcggacggtggatcggcggttcgacttctacttcaaccgtgcgaagaacgaggctgtcgtgcgcgagccggcaggcgagaccctgctcgtctaccgcggatgcggcaatgccgatgatggcagggccgtcacgctgaaacgcaacggtgtgctcatcacggtgtcgcaacgttgacggatcgccggctccagacatggggccggcgatccgaggagagtcgggccgcggcgaagtccgcgacgacgtcgacgtggacgacatcgcaatgctgctgcgcggggaggcgcgggttcatgacggtgaccgggcttccggcgcggaagcaacgccggccgcagggccgcgggccgattaccggctgcggctgacgctggaccaatggacgccggacggtgcggtcagcggcgaaatcactgacatcactcggctgcgactgcggttccgcagcgattacggaaccgtgacggccctcgacggatccgccgtaccgcagacccaggatctgttccgtccgctcctgctcgtggtgcaccgcgatgacgggtcgggcattgacggctcgactgccgatacctcgcgcgtggtcatctccgtcgtcgcggaacgactcgacacccccgtgcgcatccccgacacgcctgacgcgaccggcaggcggggcatgcgtttcttcgccgaccctgaactcgcatacgaacgcgggacgttctacctgttcgccaccaccgacggacacggcgggtggagcggctggcagatccgctgcctcgcctccgaagacctgacacattggcaggaccgcggtgtcgtcatcgacctgcatgaccagcatctcgacggcagcggccggaccaacatcctgcccggccggacgcccacgcctgggtgccggcgctcgccgttcgcgacggccgctattacctggatttctgcggcgacgggcagaccagtgtggcggtatccgaccatatcgatggaggatacgctctgcagggcgacttggcgcgaaccggctcgcgcgccgcgcggcacggcttcggaaccggcatcgtcgcgcccgacatcgatcccgcggcgttccgcgacccgcagaccggccgatggtacctagcctggggcagaaccgggcgcgctattcccgcctgtccgacgacatgctgcgcatcatccccgaagccacgcccgacatccgggaggccgcatatctgaacgtgagagagcatgccggaacgtggacgtactatctcacgtactcgatcggcgacaccaacgatcccgactatcgagtcgcctatgcgaccgcgtcgaccatggaaggcgacggttcgcagtggacctatcgcggcgaaatcctggtcgccaacgaacgcctcggcatactcggcaccgggcatcactgcatacttcgggtccccggcaccgacgaatgggtcatcgcctaccaccgctttctgccggacgccatgcgcccgcgcggcgtggaccggtacacgggcgagcgcatccgcaccggcaacaagcgcgaaatccggttcgccagactcgaattcgacgaacgggacggatggcgtgccgctcatcagaccggtgacggtatcgatgagcagcctggcgtggtcatgaacagcggcgacatgcgtggtggcgaacacgtcatcggatggcaacgatgtcgcgaagacgacaaaactgtagcagacatgcggtaaggaggcccgtatgacaacttcggcgaagacgattaccatagggggagtttcctctacgagtaaggttgacgcgatgggcaagaccgaaaacggcaagaccggcaagagcgagatcgcgcagaacctgccaggctcgccgacgacggccgcacgtcggcgcgtcacgttgcgcgacgtcgccaccgcggccggcgtgtcgctgaaaacggcatccaatgtcatcaacggcaccggacgcatgaccgacgccacccgcgccaaagtcgaagccgtcatcgagcagaccggataccgggtcaacgtcgccgcgcgcaacctcaaccgggaccgcaccggcttcatcacgctcgctgtgccgacgctgaccgcgccgtacctgtccgagctcgcgaaccgcgtgatcgacgccgcccggcagcgcgggtacctcgtgtacgtcaccacatacgcggaagggtcggcgacgggcgcccgcgagctgttgcgcaacttcaacaccacggtgtcggacggcatgattctgtcgatgagcgaggtcgaggacatcaacccggaggacctggaggtcgatttcccactggtggtggtcggcgcgcgaaccacatggggcaaggccgatcatgtgacgcccaacgacgtgcaggcggcggcatcggccgccggatacatgttcgactgcggcgtgaagtcgctggcggtggtcggcggacatggcgcatatgacgaggcgaagctgctcggcgcggtggaaggcaacgcgcagctgcgtttgcgcggcatcatcgaagaatgccggcgacgcggcatgacgctggacgcgcggctggtcggcaatgtcgagcaggaatggacgattggcgcgggcgcccatgccacgcaggagctcatcgacaagggcgtgccgttcgacggcgtcatcggcctgaacgaccagctggccatcggcgcgttgaccgtgatgcgcgcgaacggcatcgagattccccggcaggttcaggtgatcgggttcgacaacatcgaggagtcgcaatacctgcagattccgctcaccaccatggattcgcgtctggagtggaccgcgcctaccgccgtcgagcggattctcgggcgcatccgcggtgagatcgctaagcccgagttgttgatgaccgattgcaatgtgattgtgcgcgacagcacgcggtgaatctcggggattacgggaaccacgctctcaaaactcgcagatacaggccatttttagtgaatttggccctgtgagttttgagagcgcgattgtagatataacgccgcgtttccctatttgaggtcggtggcggcatgtgctccgtcccgcgaaagtcccgtttcactggccttggatgggacttttgccgggggggggtatcgcgcgctgacaatcgacatgatgacggcttggtgggcgctggcgggggttgtcggtcggaggccggctggggtggtcgagggatgcttcggccatgggtcttgcgtagaaccgtggtgtgcgtcgggtctgatttgtcgcgacacgcccggagtggtggcacaattgcgaggctggttattgcggatcggaggaattgcgcggtttgtcacgactgcatatggcggttgtgctgcgcactccgggcgtgtcgcagctgatggcggcggcgttccctggcgacgtcgttccctggtaggtggtgttcctctgtcttgcgtgttgacatgttctgatatagcggtgtatcattgctcgtcttgatactccgttgtatcaaaagaagccggttccgcccgccgacacgatcgcgccggtgctctccggcgtggatgacgtgacagtggaacaggattccgaattcgagccgttggccggcgtgtcggccacggacggtgtggatggcgacgtgaccgatgccgtcaaggtgtccggttcggtggacgcggcgaaaccgggagagtacgtgctgacgtagacaaggccggcaacacggccaccgccgagcgcacggtcaccgtgaaggccaaggaagggccgacggagccgggtaagccgaccgagccaagtgatgccgagccgactgagcccagcgagttggatgacgacaagatggaagcgccgcacggccagcatggtggccggcagaaccagcatggcctgttcgccacgggcgcgtcgcggtcagcgggcggtcgtgctgctggccatcgctggcggcatggcactcatcggccggcggcgttgttgacgggctggtgaccggatggccgctatgacggctgatcgatcggtgcaggggccggcggcgttgtctgctggcccctgcaccgatgccgccaatcgcgaatcgtatgccggtcatccgatatgatggcatactggtgtagggaggctcggcatatcgccatggcatatgctccgaaccggatgtagtgtgaagacaaggagacgaccatgctgggaaccagcgatctcgccgttgcggcggctgctgcgagcgtgccgggaatcaaactcaatgacggcaacgtgattccgcaaatcgggttggggctgctgcgaatcgagaacgatgatgtcgctcccgtggtcaaatcggcgttggcggcggggtaccggcatatcgacggagccgcgggctacaacaacgagggcggcgtcggccgcgccctcgccgaaaccggcttcaacaaggggcgcaagcgcagtcatctgtgggtcacgaccaagctgcgcgactccgagcaggggtacgacatggcacttgcagccttcgaccgacagctgggactgttgcagctggaatacgtcgacatgtacatgattcattggccgactccgttcaattggcgttccggagcgacctggaaggcgttcaccaagctgcgcgatgaaggccgtgtgaagacgctgggcgtgtgcaacttcctgccggagcatctgacccgtctgtacgaggagaccggcgaatggccggcggtcaaccagatcgagctgcacccgacctggcagcagcgcgaagtcgtcgcattctgcaaggagcacggcatcgcggtcgaagcatactccccgatggctcgcggcgccgatctgaaggccggcaacggcacgatcgcgcgaatcgccgaggcgcacgaggtgtcgcctgcccaggtgatcctgcgctggcacatcgaaaacggcacgatcatcatccccaagtcggtgcactccgaacgtcagcggcagaacctcgacctgttcggcttcgcgctcacgctcgatgaacatgccgccatcgacgcgctcgacggtccggaacgcgcggggcacgaccctcgcacgttctcctacgcctgatccggcggggagaaaggtacgcggcgtgagtccgggcttatgccgcgcgcctgagccgacgacgataccgccgcgcagcccacgagactgaccgcagaaccaacgacaggccgattgaccgtgcgcacgcattttcgcaaacgccgattccgcggatcatccccgctggaacgtcttatgatactggtggcgatcgccgccctgctcggcgtcgtcatcggtctggcgttgcccaaaatcagcccctccatcggcgagatcaccggcgaatacattgcctccggcccggcggcggacgcgctgaacgggctgcaggtcgacgaccggcccgactccaccggctacgaccgcgactcattcggattccgcgccaccgacgatgatggcgacggctgcgacgtgcgcgacgatgtgctcgcccgcgacctgactgatgtcatattcagcgcagccaagcgctgccaagtctcctcgggtacgctcgccgacccctacaccgggaagaccatcctgttcgtgcgcggccgaaacaccagcgccgccgtgcagatcgaccacgtcgtggcgctcgcaaacgcctggcaatccggtgccagggactggaccaccgcccagcgctaccgcttcggcaatgacccttacaatctgctcgccgtggatggccccgccaaccaggacaagggatccgcctccgccgcttactggcttcccaccaacggcgagtatcgttgcgaatacgtcgcgcggcagatcggcgtcaaacggcattacggtctgaccgtcaccaccagcgagaaacgttcgatgctcgccgtgctgcgcgcatgccccgcgcaacagatccccagtcagtgaggggcggaatagagcccatcgctcgacaaatgccgcagtccgcccaacgggggagtcgtgtggcgggaaattcgacggtctgttacaaacgcggtgtataccattaggcggatcgagtagcgcccaggggtcgggcgcatgagaggaatgagggaatgaaagagcatcgtcagatgatcgatgacaaaaccgatgcagagatcgacatcgaacgcagccatgccgaggaagcgtccgggcgccagcatcacgagcatgcgctcgccagcatcttggggccggcgttcgtggccgcggtcgcctatgtcgatccaggcaatgtagcggcgaacatcacgtccggcgcacgatacggctacctgctggtatgggtgctggtgctggcgaacgcgatgagcgtgctgattcaataccagtcggcgaagctcggcatcgtcaccggcaagagcctgccggaactgctgggggagcgcatgagcaacgcgggacggttcatgtttttcatgcaggcggaggtcatcgccatcgccacggatctggccgaggtgatcggcggcgcgatcgcccttaatctgctgttcgggctgccgttgttcgtcggcggcctggtgatcggcgcggcctccacggtgatgctgtggttccagggcggcaggacgcagaccacgttcgaacggatcatcatcgtgttgctgctggtcatcaccttcgggttcatcgcgggcctgttcgtggccccgccggatcccgcagcggtggtgcggggcctgatcccacgcttccaaggcaccgattcggtgctgatggctgcctcgattctgggcgccaccgtgatgccgcatgccatctacctgcattccacgttggtcaacgaccattactacacgcacggcgataagccgtcgatcgccatgcagctcaaaggttcgaagatcgatgtgacgtgggcgctgctgctggccggcacggtgaatctggcgatgctggtgcttgccgcgaactcgttgcacggcatgtccggcacggattccatagacggcgcgcaacgggcgatcacgcaggtgcttggcccggtgatcggcacgatattctccatcggcctgctggcctcgtcgttgagttccacgtcggtcggcacgtatgccggttccgagatcatgcgtggtcttctgcatgtcaacgtcccgatgtgggcgtgccgtgtggtcacgctggtgcccgcgctaatcgtgctgtggttcgccaaagaccccactcaggcgctggtcatcggccaggtggtgctgtcgattggtattccgttcgccgtgattccgctgatgcgttatacgcacaccaaggagcttatgggcgaatgggtcgacgggacggtcaaacacgtgatcttcatgatcgtggtggcgttgatcgtggcgctgaacgtgctgctgatcgcgcttacgattttcgggcgtgcgtgacgtggacgactgacgccgagactcgccgatttcccgcggattccgctccgagatgcaggattagggatggcatatgacgaaagcgttcctaagtgcgcgccgaaacgacgaccgtgcgcacttaggaacgcaaaccgggccatttgcgtccctaagtgcgcggacttgtcatttcggcgcgcacttagcgacgctttcgcgctctgatggctctggatcgttcggagccgtgatgtttggcaattggattccggttaccagtgacgttcctacgcaaattggcgactattgtcatcgtccggtgacaatagtcgccaatttgctgcgattaccggtgcgagaccgtgcggattctcgcgatggcccgctgcgccacgtcccgcgaggatccggcaccggctcctttgacgccgaacagcacgatgagcacctgtatgaacacgatgaacgcgctgactcgcagcgtccactgcgtgccgaagatgctcgcggcgattgcgtcgcctccatgcagttgaatcagcgtctccatcaggatgaccagcacgggggctccgatcgcacccgcgatctgccggaccgtgttggtgaccgccgacccggctgacacctccgtcgggtcgaggcagttgagcgaccaagtggtgatgggcatgatgatgaaacccatgccgatctggcgcacgaactgccatatcgatacccaccagatccacgtgttgctgtcgatcagactcatcatgatggtgccgaacagcagcaccatcgtgccactgagcgccaccggcctcgccccgagccggtcgagcagcttgccgccgaagaactgcgagatgcacatgccgaatgcgccgggcatcatgaccagtccgctgatggtcgccgaatagccgcggtcgttctggatatacagcggcatgatcaccatgatcgaactgaatgcgaagaagctgagtgcggcgcagatcgtcccgacggtgaaactgcggttgcgcagcacgccgaggtcgagcagcggcggttcgggagtggtgcgttgcgcggtgtccgactcgtccacggattgccggacggccaccgtatacgccttcgcgcggcgcacctgccgcaccacgaaccacacgatgccgcacagtccgacaagcatcgcgccccacaccatcggattcgacggtgcgtacgattcgatgtttgtgaacccgaacatcaggccgccgaagccgagcaccgacatggccacggagaagaaatcggctttggcatggtcgtcggtcgtcccgaagttacgcagcccgaagatggacagcagcaggcagaacacgccgatcatcgtgagcgtgaagaaaatcgaacgccagccaaaactgtcggtctggaagccgccgaaagtcggccccagcgcgggggccacgctcatggccataccgaccgcgcccatggccatgccacggcgggatagcgggtagatcgagaagacggtgatctgcagcaccggccacatcacgcccgtgccgacggcctcaagcagtcggccggccagcaccaccagaaacgtcgggccgacccatgccagcagcgatcccacagcgaacacggtcatcgagacgatgacgatttgccgggtggtgaagcggcgcgtcaggaacgcggtgagcggcaccatcacgcccatgaccagctggaaaatcgacgtgagccattgcccggtggtcacggagatgccgaattccgatacgatggtcggcagcgcggcggacagctgcagctgcgtgaagttgccgacgaacgtgatgaacgtcaagatggcaagcgaagcgagggccacgcgcgaaagatggccgttcacatagctttcgttgctggagagcggcgtggacagcgtggatacgcgtttaccgccggctgtgccgccgcgctttgcgagggttttcttcgggttcttgccgttcgtgctggtttccgtgctgctgtcgttattgtcgctgcgattggtcattgtgccgtattctcctccgttccgcctcatgcgcctgtgtatgcgtcatccctgtttcgctgcgtagggattgttgtatatgcatcatttctgtcgaccaatacactactcctacaggtgggcaacccgggtggaagcgtggggagaaggttgggggagaagggcgcggaggaaaaatgtagggaaggccacggaggggtggaatggaagaacacagagaggagggcgcaaggaagcggaagttgagtagggggagacgaaaatatgagcactcagatattggcggcgcggagatgcgatggtgcggaagtcgcgccgccgcatctccgtcagtacgagccggtgccgcgcacgacggccaccacggtcttgagcaggatcgcgatgtcgccggtcagcgaccagttctggatgtacgacacgtcgacgaattcggactgctcctgcgtcaggttgctgcgtccggacacctgccacggaccggtgatgccgggcttcaccagcaatctggccgaatacagcgtgccgtagcgcgccacttcctccggcagcggcggccgcgggccgacgaggctcatgtcgcctttgagcacattgaagaactgcggaatctcatctatcgaggtcttgcggatgaaatgtccgattcgcgtgactcgcgggtcgttcttgagcttgaagacgaaccggtcctccatgccgtattcctcggcgagctgcttcttgatggcttcggcgttgacgttcatggaacggaacttgtacatcgtaaacggcttgccgtagatgccgatgcgctgctgccggaagaagacggggccgccatcctcgtgcttgatcagcagcgcgacgaccagcatgatcggcgaactgatgatgatcgcgatgagcgagaagaagatgtcgctcaggcgcttgaatattctcgtgatggtggagtactgcgtgagctgcgcggtgagtaccgacatcaggggattgctgcggaagtggagctgcgcggcgctcaggtcggccagcgacgcggtctgcgcgagctcgatgcccatggattccatggcgagcgatagggtggattggcaacggtgtgttggacaggttcttagaggacgagtccctgttcggtgaattccttcgggctccggtatccgagggtggagtggagtctttggttgtcggaccaccacacatagtcgttgaggtcggagcgtagttgttccaggctggtgtagtggttccggtatatgagctccttcttcaggagcctgttggtggattcgaccacggcgttgtcgtacgggttgcccttccctgacggcgatcttctgatgtcgaacacgtcgagcagctcgtcgatcctcgcgttgtcgaactcgctgccccggtccgtgcggaacacctccacctcggtcagggggaagtcgagcgtggcgaacgcggccatgaccaggtcggcggtgcggctcgtgtcggcgctgtggccggcgatgctcctgttcgccaggtcgatgagcaggcacgcgtacgcccacttgccgccgacgcgcacgtacgtcaggtcactggccaggtgggtgcgcggctcgtagccgtcgaactcgcggtcgaggatgttcgcgagcctggcctcgttaacccgcgtcttgtgtggtttgaacgttctgcgcgcgtacgcgctcgtcatgccccgccgtttcatgatgttgacgatgcgccttccggaggcggtgacgcccctccgctccagcgcggccttgatcttcccggcgccgcagcgctcatggccgtcgcgccagatcgcgtgcacgtcgccggcgatcgggtccacccgcccggcttcgggatgcacggtcatccggtagcagacggagcggggaacgcccggcatcctgcactgcgccgatatcggacagcgggaggcgttggcccgtatcactgctactttcgtgcgaataccggcgccgcctgttctgaaacgtccacctccatctccaactgtctgttgcgcttgcgcagctcgaccggctcgttctgctcaggggtgcggttgtcggcggctttcgtggagccgctgttgcggatgccctggacccaacggtgcagcgtggaatgcgagatgtcgtactcgtccttgatctcgcgcgccggcttgccgttctcgtaaagctgcacgatccgccgcttgaacgactcctcgtagtggcggggatgcctcgggccggccatcgtcggcctccaatctcatgtcattcgtccctcatcggactgtctaatacattgtagccaatccagtttatgcaggtcgcgcggctctcgccagtgaccgtgcgttttgtggtccttctatggcgacaacgcggttgtgatggtgacgcggtgacgatgctcatggcctgtggaggcgatgacatgctaccttgggcgtatcggcgcatgacatggtcaggacggtaccgtatataatggcgtgaacgttgaatatgccggtgaaacggccataatagggaacagaaggccgggcgaatcccggaaagcggacatgaatcgggggcggatgatgaacgagcatgaagcgcatgagcgtgatatgcaatgggacgatgccggcgacggcgcgggactgcccgaaacaggggagcgtgacgctgtgcagggcattgaaccgggcgccgagcggcatgcggccgaatataaggccgtagcgctgggcgatgccgtggctgctgatgccgccggcgccgccacgagtgtcatcgggaacgtcccggttccgactgcggcagaaggcaagacggaacccgcggcacaggagggggccggtgctgccggacagcaggccgcagatgatgagggcatgcagttcctcgacaatcccgcgtgggacatccccgacgtgatgttcccctcgatgggcggcgtcaaggacgcttcatcggggagcggcccatcgtatggtgctcccagtccctacgttcccctgcctgaaccggaggacaccgtgcggccggtgcatggctctgcctccgatccgctggggctggagggcgtgtccgatatccccgccgtgccggaggaggaagagccgcaaggcaacaacgacgtcactatggtgatacagccgttgagtgctttccctacgcccacgcagagcgtgccacctacagccggaatgacgccgcagaccgtgccactgccgcctgaggcgggcgcggcggtgcctcctcatgggagcggagagccgggcggcaaggcggacggcagttctcgaaagcaacatggccaccgccgcgctatcatcatcgccgtcgtcgcggtcgtcgtcgtggcgctcgccgctacgggcggattcctgtggtggcgccacatgcagaaccagaacgagctcgatcaggcggctagcctgtgcaagacctcgaagaccaaggccgacaaggcgttttccgaattgcagtccgcgctcagcgaagccaagcctgcgcagcagattccgcaaggcgatgtgtccgatccgaccgtcctggagacgctgaacagcgcggtcacaaaggcgtcctcggccagcgagccggtctcgtgcgacgtggcgttgggcaccgagacgctgaacgccaatgccagcaagaacaagcagatcgcgcgcgccagcaccaaggcgaagacgaacgtcgccaaggccaccaaggctgtgaacgacggaaaggcggagaaggtcgagtttatcaagcatgaactgcagacggccgtcaccggcgcgcagaagatttacgacgacagcaagggcgttgtgctggacgactcgaccaggaccacgctgcagtccgccatcgatcaggcgaacgcgttgctgcagcaggatgacgccgatctgaacgagatgcagcagtctatcaccgatgtgaaggacgccggagacgcggtgaccgtgtcgatgaacgagtacaccgcccagcagaagtatctggagcagcagcgccagcaggaggagcagcgccagcaacaacaacagcaacaacaacaggacgaccagaacgacaatggcgacgacctgaacggcagcacgaattcgcagatcggtgattcgcggggtcacgagacccagccgacccacccgcaaggtagcgacgactgatagatggtgattggcggtcggccatcctgtttgaccacccccagtcgcttcgcgtcagccccccgctggtgggggcattactctcgcccccgatggcgggggctgacgcgaggcgactgggggtggttcatatagactgcccactcttgtcggctctgccgtgaacggcaggttattttgcgtcgttatgtgcgcgtactcgtcgtttcggcgcgcacataacgacgcaattgcggccaattcgtagttgtctctcgcattgcgatcggctttataggtgagtcttgcgacaacaaaaaccggcccccgcaggagccggttgaagaaacgatagcgcgccccgccgtcagtagttgctgttggccttccagtaggcataggcgccggtgatggagccgtagcgctggttgcaatagttcacgaaccacttgaactgcgtctggtagttggtgcgccaatccgcacccgcggatgccatcttgttgccggggagcgcctgcggcaggccgtatgcgcccgagctcgggttcgtggcgttcgtctgccagccggactcatgattgatgatgaagttggcggcggtgaagtcggcctcggtgtaaccgttcgccagcagccagtcatgcgcccacttctgcttctcgccggagggaacggtgtcaccgagcgtgttcgcggccgcctcttcggcggaaccggtgccgaccaagatcaccttgtcgacaggggctttcttgacgtacttggcgaagacggtggacgagacgaccttgcccgcggagcgagtgaccatgctggtggtctgcagcacgccttcctgaccttcggtctgcaccttctgctgaccctgcggcaggctggtggtctccttcttgaccgtgttgaacgcgatggcggtctccgaggtctcggcctgcgtgtcggcacgcgagatggagatgaccgtggactcgtccaccttcgtggtcagggccggcgtgacgctgtcttccggctccaacgtgatgttgcccgcgtccagtacggatttgacgtcggtgaaattgtcgcccagcacgaagcgggacttgccgttgaccttcaccgtcacatagctggtgttggcgtcggcgccacgcagatccgcacggttgttgcttcgcgagacgctgcttccggcgaggtcggtggccgagtattcgttgaccgtggttccgcggccacgaccgatgtagaagtttcgggagacgatgccggccgcaaccaccatgacgatcgccgcggcgatcgctacgatgcggatccactggcgtttgctcagcgacagcagcgttggtgcattggttttgcgatggctggccattatgctccttgattgacggacaatcctcggcgaatccggccgtcaatcacgacgggcgggtgatgcgtcgacgctggtgggcgccgcaccggagtacacaccaaatccaagtctagaccactatgacgatcttgtgaaatcttggagccggcggattccgtgttccgcccgcgcccgtggcaccttcgcctggccgccggcgcacgaacgcggaatccgccgggaatcgtcggttattcggcggaagcggacgaatcctgcgcggcggcggaaacgtccagcgccttcgcctgcgcgatcaggtcgtcaaggtcttcggcgcgcagcgcgccggcctgcttgaagatgatctggccctgcttcgcgatcatcagcgtgggcactgcctggatgccggccgcgctggccagatcctggttcgcgtcgatgtcgaccttgccgaagacgatgtcggggttctcctcactcgcggcctcgaacgtggggccgaacgcgcggcacgggccgcaccaggtggcccagaaatccacgaacaccaggttgttgtcggtgatggtcttctcgaagtcctgcgcattgagctgaacggttgccatgatcgtttcctccctcgttgtcatggtgatgttcccatccgttgtcgtcccccagcatcccagcaccactcaacaaactacgccgacggacgaatgcggacgtccgcatcgcgcgttttccgtgattcacatcgcattcaggaatccttgtcgaaatcgacacgttgtcgtcacgcgagttggacgataataagaccatgccagttttgaatgacgaagtacctgacgagggcgatttcgacgccggccgccggcgcggcgaattcgatgacatcacgcccgaggatttcatccgcgggtccggtcacggcaatccgcccggctggctcggtccggccgacatcagtcgtgcccgtcggcagctgccgatcgcctatgtggagatcgtcccgattcgcactgacgacctgggcagggtctcccggatcggctccttgctgcacgtttcggacgacggatccatagagcgcacgctgatcgccggccgcgtgctgttccatgagagcatccgcgaggccatcgcgcgcaacgtcgccaaggatctgggcgacatagcgctgccgatgctgccgcagagcctgcagccgttcaccgtagccgagttcttcccgacgccgggactaagcgagtattacgatccgcggcagcatgcgataacgctgtgctatgtggtgccgatcgccggtgactgcaagccgcaggacgagacactggacgtcgagtgggtcgatccgcgcggcgagatgatggagacgttcatccggcagatgacgaacggacatgaccgtatagtccgtcaggcgttggcctggctggatttgtgacgtgccgtctctccgtccggccggtccgcgagaggacgcgggtcggccggacggcggcatgatcggcgggaatgggccgtggacggcggccgacgacagtggccgacaccggtcgatgaaacgatgacgatataggagcgcaacgatgatgacgctgaacaatacggtatacgcgacgggggaagggacaccgctggtgctggtgcacgcattccccgtcgaccaccgcatgtgggacgactgcgcggagcagattgcccggcaggcgcgggagacgggcgacccggcggtgacggtgtgggcgccggacatgccgggcgccggggccgggccgattcccgagccggccgacagcgggcgggtggcggtcgacggggcgctcacggacgcgctcgacctgatggccgacgcctatgtcgatctggtgcgtgccgccggctacgacaaggccgtatgggccggactgtcgatgggcggatacgtggtgctggacatccagcgccgccatccggacatggtcgcgggactcgcgctgtgcgacacgaaagcgggcgccgatggccccgaggcccgcgcgaaccggctggcgtgcgcgagcgaatgcgaggcgacgcaaaccgtgaagccagtcatgcatttcgccgatgcgacgccgtccgattcaagcttcaagcagtccgatgagggcagggcgctgttcgcccgctggattggcgagcagacgccacagggcgtgggttggcgtcagcgcatggccgccggcaggcctgacctcagcgatcagctgccgctcgtcaccgctcccgcggcggtgctgtgcggcgacaaggacccgttcagccccaggccggcgatgcgggcgctcgccgatgcgatgaccggcacgtcgccgagtttcacggtcatcgaggattgcgggcatttcagcgcggtcgagcatcccgatcaggtggcgagcgcgttgctcgatctggtgcgacgcgtgcatctgcgcgaatgatcgcgggcgcagtcggccggacacggcatccgcggtgcggtggggccggtggcgccggcggtgtgacctgccgcgacgatgattgacgatggatacatgaggagtgtgaagtgatgttttcaccattggcattgacccagacgttgccgttcctgccgctggcgcagggcgacatcgattatcaggtcgcccggcgcggagatccggacctgttcgacacgctgttcgccgaccccgtcaccaaggtcatcctggtgcggggcggcctgctggccgtgccgcgcggtcagggcaatgccgtcaactatgcctccgcgaacatgaggctgagcacgctgccgggcgcgtacgcgggctccgccttggctgtccaccccgaagtggtgccgatattcctgggatcgtatggcgcgctgcgcaacgagcatgtggtggcgctcgacatcactcggatgtcgacccccggcgcggcctcggcgattccttcgccgtcgctcggcgccgacgcggcgtttgatgccgacggcaatgctcccggtgcggtcgcgcctgacagactggacatgctggaacaggccgtggaacggttcgactgggtggatctgcgcgggttcgccgcgcacgccaacgcccgcgaggccggacaggccacgaccgcggtgaccctgagcatatggtacgccgggcagcggttctgcccctcctgcggggctccggtcaaggcggcgatgggtggatggtcgcagcggtgcacgaacgcgggcgacgggaaccgtctgctgttcccccgcatcgagcccgctgtcatcaccgcgatcgtggacagtcaggaccggctgctcttgcagcacaacagcgcctggcgcaatccgctgctgtactccgtttcggcgggattcgtcgaggcgggggagaaccttgagcacgcggcacgacgcgaggccaaggaggagaccggcatcgacctgggcgaggtgcgctaccttggctcccagccgtggccgttccccgcgtccctgatgatggcgttcaaggcgcaggcgttgagcaccgacatcctggtggacggcgaggagacggagaccgcgcgctgggtgacccgtgacgaatacaccatcgaattgtcggagggccgtatggaagctcccggcaaatccacaatcgcccggtacatgattgaggagtggtacggccgcgaactgtgacatgcgccgcacgacaatgattcgtatgtctgccgggtgttatagtgaagccagagagtcgaagtaaaggaacaggaatggctaacgaatacacgggagacgataatcaggaagatgagcgcacgcaggcagtcttcccgctggatgatcagatgaacatcccgcctctgaacatgcccgcccttcatgacgggtcgacgtttgacgctgagccttccggtctggcgggtctggtccaggagactcaggcgaagcggcaggcggatgcggcctccgcacagacgcaggagtcgcaggagactcaggctttcgacccgttggccgagctggacgatgaggccgctcctgagccgcagcccgccgcacctgcgacttcatcctttgccccgcagcgtcccgccgcggacgacgtcgcgaccgtcgccttcgccgcggtcgccatgaacccggccgatgacgccgcactgggcaagggcgtgtccgcggccaagacgaagaacccgaagcgcggcatgatcatcgcgttcagcatcatcggcgcactgctggtgctgctggtggccgcattcttcggcacgaactggtatttccaggaccgcgtcgccccgggcgtccgattcggcaacgtcagcgtcatgggcaagaccgaaggcgagctcaccggcatcgtcaaccaggccgtgtccgattcggccatcaccgtcaccgattccgagggcaacaacgtcaaggcgggcctcgacaaactcggcgtgaccgtcaacgtcaagcagaccgtgcgcaacctgctggacgcgaaatccggcaacatgttcacccgcatcaacccgttcgccaagcaggacgtccggctgtccgccacgaccgacaactacacgctgagcacctacctgaccgagcagctcgtcaaggagcaggatcgcgcggtcgcctcgaacatcagctacgacgccaactccaagaagttcatcgtcacggaaggcaacgagggcaaggaagccgacccgtcggacgtgatcgcggccgtcaagaaggcggtctcccagcccggcgaagcacaaaaactgaccgtcatgtactccgacgtcgccatgcccatcaccgtcgaaaccgccacgagcgcggcgaacgacgccaacaagcgactgacgtcgtcgctggtcatcggcaactccaagggcaagacgttcacgcttcccgccgatgagatagccaagtggatccaggtcaagcccgacatccagaagggcaccatcacgctggcatacgatcaggacgccatcaagacatacctgtcgcagagcctcgccaagaaactcgatcaggacatggtcgtcgagaagaacatcaccaacaccgacggtaccgtgctgaccgtgacgcagaagggcgtcgacggcgtggctgtccaaagcaccgacgagaccgccgcgcaggtgctcgacgcgctgaacgccggcaggggcgcggagctcacagccacggtgaaggtgaccggccacaagaccgaaagccgcaaggtggactacacgtcgcccaacggcgaccctcacatggtcatcaatctcagcgagcagaaagtgtacgcctacaagggctcgaccctggtgaagaccttcatcgtctccaccggcaagccatccacgccgaccgacaacggcacgttcttcgtgcacaccaagtaccagtcgcagaccatgcgaggcgaaggctacgtcacgccgaacgtgccatgggtcacatactacaaccagggcgaaggcttccacggcgcaccgtggaacaccgcgggcatcgccagcggcactccgaagtcgcacggatgcaccaacatgcacgtcgaggacgccaagtgggtgtatgacttcctgccgatcggcgccatggtgcagatcgtggggaccacgccgacctccgctgtgcgctgattttcaggcgattgcgctgactataccgctgatgccggccccgccgatcattgtttccgatcggcggggccggctgcgttttcggggcctctccggccggctcagggtcagccccatcgataagcgctgtgcggtacactgggggcatgagtgacgagaacgcaatcgacaacccgttgaaccttgacatccccgatcacctgcagtattcggaagagcacgtgtgggtggacgattcggtgtccccggccatcgtcggcatcaccgcgtacgccgagcagcagcttggcgagctggtcttcatcgacctgccggacgagggcacgcgcgtggaggccggcgacgaggtccttgagctcgaatcggccaaggccgtcgaaccgctggtctgcccggtcgccggtaccatccgctatgtcaaccatgacgccgcggacgacccctccgtcgtcaacaacgacccgtacggtgaaggatggctgctgaagatcgagctggacgatgacgagccggaactgctcgacgccgaatcctacgcgaagatcgcccagtgaccggcaccgccgtcggcgaccgacaacgcaagccggcgatggccgacggtgacgaaggtacatgacgacgacatatccgacggatatatttgacatacagctaacgtgataacggatggcggaacccatgagcatcgcacacgacaacacaccacgccggggcggagcgcgccctctcggcgggcgggatgacgggctgcggcatgacggcccgatacatgacggatcggatccggacaacgcggctcacgacccgtccgggcagaccggctccccgcaggacgacatgctcaccgtgccgattcccgcacgcccggtcgtcaccacgttcgacgccgcgtcgcggcacgagcgcatcgaggtgcagccggtactggtgcgccgcatgcgccgggccgtcaccggcacgttcggattgtgggtgcgactgtccaccgccgtcgcgcgcaaactcgactggttcccgcgcgtggacccgtacgtcggctatggcaccgaggtctactctaggctgatctgccgcaccgtgtacgcgcccaagcacagcagcgccggcacactgacgcgcggcatcaaaggcatgctggcgattcccgcgtcccgcgtgcaggtgcgtatcagcatagacgggacaccgctggaaaccgtgcagatcggcgaatccgagcgatatgacgaattcaatcccatgcgagatctcggcagcgaatacgcggtgtccgacgaaagcggatacctcgacctggtggccgagcatcagctggagaccggcgttcaccgcgtcacctatcgcgtgaaggggcggccggaggtctcggcgagcctgttcaccatcccctccagcgcgaaggtcggcatcatctccgacgtggacgacaccgttatggtcacgcaggcgccgatattgtggaaggccgcatacaacctgctgttcctgaaccccaagaagcgcaactccgtgccgggcatgagcgtgctgttcaccaaactgcaggacatgttccccgacgcgccgttcttctacctgtcaacgtccccctggaacgtggaaggatcgatccggcatttcatctcgtatcacggcttccccgaagggccgctgctgttgcgcgacctcgacccgcgcccgaagacgttcgtgccgtccggtccgcagcacaagctggagttcgccgaacagctcatggcggacttccccgacatgcggttcatcctgatcggcgatgacgggcagaaggacccgaccacgtatgcgaccatcgctcggcgataccccggccgtgtgctggcgatcggcatacggcagctgtcgccccgcgaggccacgggtctgtcgtcgatgatgggcatgacctcgacgcagccgatgcccgtcaccgacgtgccggtgttcaccggcaccactggttcgaacatcatgaagaccatgctgccgtacctcaagcagaaactcggacgaacggacctggcggagtgacttcccgaagagcgaagttcgccgctgtctcaagtcgggccgtataatcacgagcatgacagacgaaacgaacggcggcgtcgccgcttgccgacctcccatcgcccggcgtgaaccggtgaagcgcgtgttccacggggacgccgtgattgacccgtatgaatggatgcgagacaagcagtcacccgaggtgcgcgactatgtggccgcgcagaacgcgtactgtgacgcccgcatggcggggctggcggggctgcgcggcacgctgttcgacgagttgaaggcgcatgtgcaggagaccgacatgtcggtgccggtgcgcatggacggatactggtatttcgcgcgtacccgcgaaggcagccagtacgccgtgcagtgccggttgccggtgcgcggcgaggacgattggacgcctccggaagtcgggggagccggcgatgagggcgggagcgccgtcggagccggttcgctgccgggcgagcaggtggtgtttgatgcgaaccgcgaggccgaggggcatgatttcttcgcgctgggcggcctgtccgtcagcaaggacggccgatggatgctgtacggcgtcgatacgcgaggtgacgagcggtacgacttccgcattcgtgatcttgacacgggcgatgagctgccagagcgccttgagggcatcggcgcggcatgcttcacgccggacgcgcggtgggtgttctacgtgacgcttgatgatgcctggcggccgtgcgaggtgcgccggcaccgcgtcggctcgccggtcgagcaggacgaagtcgtcttccacgaggacgacgagcggttctgggtcggggtcggcatgagtttcgacgagcacagcatcgtgatctgctccgcgtccaaaacttcgtccgaagtgtggatgctgtcgaccgcgacgccggaaggcgagttctcggtgttcatcgcgcgcaaggacgacgtggaatatgacgtgagcttcgcatgcttcgaaggtgccggggctgacggggccgatattccggttgccgtggtgtaccacaatgctcaggatccgaacttcgagatcgacgtgatcgacatgcgaacccatcagccgccgtatacgctgggagaaggcgtgcgcgtggcggtcggctcgccatatgggtgcgcgcgcggcgacgacatggaggcgggtgcgggcgcgaagccggccgggacggcctactcgaatcccgccaacccccggatattgcagggggcgcacgggctggccatcgagggcatcgccatccaccggcatttcgtgacgctcgcgtaccgcacggacgggttgccgcacgtggcggcgatgaccaagacgcaggcggccgaagacttcctcgccgggcgtccatggtcgttccgcgagctgatgccgccggcgctggacggcgactgggacgtgcccgggcgggccgatgacggtgcagccgaggccgcgggcggaacgctgccgggagccacccatcgtctgtactccatcggaacgggcggaaacccctcgtatgatgcgccgcgcatgcggtacacgttctccagctacacgcggccgggcgaactgcatgagtatgatccggcgaccgggcatgacgagctgctcaagcgggcgcgggtgctgggcgacttcgatccgcgcgagtacatggagcgtcgggtgtgggtcaccgctcgtgacggtgagcgcatacccgtgtcactggtgtggcggcgcggccatgagccggccgctgacggcgcgatgttcatcaccgggtacggtgcttatgagatcagttcggaccccggcttctcagtcgctcgcctgagcctgctcgaccgcggcgtgctgtacgccgtgccgcacgtgcgcggcggcggcgagatgggacgcgcctggtatgagcaggggcggcgcctgaacaagcggcacacgttcgaggactccatcgacgtgaccgccgcgctgcaggacgcagggttggccgatgcgcgtcggacggtggcgtacggcggctccgccggcggcctgctgatgggtgcgattgcgaacatggcgccgcaactgtatgcgggcatcgaggcggatgtgccgttcgtggatgcgctgacgtcgatcctcgatccgtcgctgccgctgaccgtcaccgagtgggacgagtggggcgatccgctgcacgacgcggacgtctaccggtacatgaaatcgtattcgccatacgaaaacgcgccggagggcgcggacggcgaggccggtgcgggcgcggcgtccacgcggtctttgcagaggcaatcgtcgcggccgttcccgcgtatcttcgccaccacgtcgatgaacgatacgcgcgtgctgtacgtcgagccgctcaagtgggtgtcccgactgcaagccgccggcatcgatgcgatcatcaagatcgaagtcgaggccggtcatggcgggacctcgggccgctacaagcagtggcgcgaagtcagctacgaaaacgcctggtgcctctccgtcatgggcctgacccgctagccgcggccgacatccgtccctgattgcggggcttccatatcgcgcccccgctggcgggggctcccgcgtagcggtggggatggtcctgcgtttcggtggttctgtgtcggatggttctcttgaccaccctccgtcgcttcgcgcccccccgcctgcaaggggatatgattttggggcccgcgggtggggatcatatggttgttccggcattcggactttgctgtgccggatagtggaatgaatggtggttcctgtgccataccacgtcaaaaacaccgttttttcgcgtggtgtggcacaggaccttgccacagaatcggttttaatcggttacatgcgctgttggggtacaagaagaatatcaaagatccttgcaaaatggccgatttcgctgtgaagcccggaatcggccatatcgggcatgtaccacaccacggtcaaaatagcgtttttcggcattctgtggcacagaccatgcgcgaagatcacgtcgcctccaccgtctgtccactagacggactgggcgcattgttttcgagcacggccacataccctgttggctatggcaaagaagtatacaatcgccgttatccccggcgatggcattggcaaggaagtcaccccctgggctcagaaggcgctggaaaaggccgctgagggagtggctgatttcgaatacgagaatttcgacctgggtgcggagcgttatctgcgtgatggcgcgatcctgccggacgaggagctggagcgcatcaagaagaccgatgcgatcctgctcggtgctgtcggtgacccgcgcatcaaggccggcatcctggagcgtggtctgctgctgaagctgcgtttcgcgctcgaccagtacgtgaacctgcgtccgtccaagctgtacaagggcgtcacctcgccgctcgcgaaccccggcgacatcgatttcgtcgtggtgcgtgagggcaccgagggcctgtactgcggtgccggcggagcggttcgtcgcgacactcctgccgaggtcgccaccgaggtctccatcaacaccgcgtacggcgtggagcgcgtggtgcggtacgcctatgagctggcgatgaagcgtcgcaagcacatcacgctggtgcacaagaagaacgtgctcgtcaacgccggcgacatgtggcagcgcatcgtcgaccgtgtcggcgaagagtacccggaggtcacgcacgactaccagcacatcgatgcggccacgattttcctcgtgtccgatccgtcgcgcttcgacgtgatcctgaccgacaacctcttcggtgacatcctcaccgacgaggcaggtgccgttgttggcggcgtcggctattccgcgtccggctgcatcaacgcgagcaacgagtacccgtcgatgttcgagccgattcacggttccgcgcccgacatcgccggtcagggcaaggcgaatccgaccgcggccatcctgtcggccgcgatgctgctgcgccatcttggcttcgacgatgccgcggcccgcatcgacacggcggtcgaggctgatatcgaggagctgggctccaccgttcgctccaccgatcaggtcggcgaggatattctcgctcgcctgtaacgcggcggtggcgtgaaccaccccagtctcgctttgctcgacagcccgccagcgggaccgagatataggcccccgctggcgggctgtcgagcaaagtgagactgggcggtttcgcatacggggtttgagacgaccacgcagacagattcggcgtgtaacgtgtatcgggtgaatatcgaaagtcgtggggaatgcaagcgcccgggcggcaagctggtcggggtgacagtggcgtgcgcgccggataacggccacgtcgtcggctgtcgcgtggacggtgattttttcgttgaaggtgacgatgccgcggtcgacaggtatctgcgccgtctgaatgcggcgcttctcgatatagcgcagcgtgatataacacagtgcgatacgccgcccgatgatccggataccgtctcctatcttgaacgcatcgcacgcgatgagcatgtatccgttaccggcgcgaatgtggaaacgatactgaccgcgttgcgccgcgcgctgtcggcttgcggccgggacgccgcgcgaccggcatcctcgcgcctcgcttcgcccgcctccgcgacggcgcatgacgcgcgcaggcgtgcaacgccgtccgccgcatcggctgttccgacctcgtctgtcacaattacgccggcggcctcggcgcctcaagcgtcccgcggtctcacaccgccgacattccccggcgagtggcacgaccgctggcatcggctcgcgccgaaaatcgtcgtggacaagccccgcaggccgcaggaacagatggatgtcgacgtgcaatggtcccgtgaggtggccgcgggggagcgccctgccactatccggttctggcagtgggcgtccccggccgtggtggtcggccggttccagtcgattccggacgaagtgcacgaagacgtcgccgcgaaggagggtttcacggtcgtacggcgctgcacgggcggcggcgcgatgttcatcgagcccggcaacacgatcacgtactcgctgtacgcgccgcgctggttcgccgcggacctggacatcgaggaatcgtaccgtctgtgcgacatgtggctgatcgccgcgctgcgtggcctcggcctcgacgtcggcttctccggtctcaacgacatcgcctccagccatggcaagatcggcggcgcggcccagcgcaggttcccgcccatcggctccggccccggttcgatactccaccacgtgacgctcgcctacgatatcgatgccgtgaagatgacccgcgtgctgaacatctccggagagaagatgtccgacaaggccgtgaaatcggccgtgaagcgagtggacccgatgcgggcccagaccggtctgagccgcgacgggctgattgcgcgtctggcggactgtctgacgcaaccggacggtcccggtgcaaactaggctacaatatgacagaaccgaccgaagacagagacgcgacgggttggattccgtcgcgaggacgccgatgcggatgcggtggcggatggtgcgccgtcgtcgcgatatcgcaggggctccgtgtcgaggtgccggtatgtcggaaacgtgaccaggaggcgtcatgagggcaatcgggccgaattcgttccccgaagaggacaacgagctgttgcatacgccgttgttcaaacaggtgtcgccggagcaggccaatgagctgattccctacctgcacgaggccgtattcgacaaaggcgactatatcttccgcgagggcgacagggaccaccgcatgtatctgctggagcgcggccgcgtcaagctgatccgcgaatccaaggacaggcgcgtgcagctgctgtcgatccacgcgcacggcgaactgctcggcgagattcccgtattcgacccgtccggcggcccccgtaccgccacggccgtggcgatgactcacggcacgcacgtggcatggctggagcatgacgcgttgttcgcgtggctcaacgagcacccgcgcgtcgccatcgacatgctgcaggtgctggcgaatcgcatgcgcggcaacaacgaacgcatatccgaccttgtgttcatggatgtgcccgcccgcctggcgaagacactgctcaacctcggtgcgcggttcggcgagccggtggaagccgggctgaaggtgccgcatgacctgacgcaggaggagctcgcccagttggtcggttcttcgcgcgagacggtgaacaaggcgctgatggatttcgcgaaccgtcggtggatcgcgcgcgagggccggtcgatcatcatctaccagccgggcatgctgatccggcgctcgcaacggtgacggctgcgccgagcgcggtgaacgcccggcgttccagcggccgttggagaatgattcggcttgtttccggtcgttttacagtcttctgaccggtttgtgagtaccctgtgagggattgggaatcagtcgttcggatgacgtgcccggtagagacgcccctctagaatggcaaccatgcccaagaagaaatccctgaccgcaaaacgtgtgttgtcgctgttcctcgcgtatgtgctgctctgtctcgccggaggcgtcgtcaccagcgcgttcttccttcccgccgtgttcgcatcgaacaacgtggtgcgtgccatcgtgccgtcgctgcaggtggagggcatcgatttcaacgtgaccgacttgccgcagcagtcgcgtctgtatgcgtcggacggtacgacgcagatcggtacgttctatgcgcagaaccgtatcgtcgtgccattgaagaagatttccaagccgatgcgccaggcggtggtctcgcgtgaggaccgtcgtttcttccggcatgccggcgtggatatccagggcgtgatgcgtgcgttcgtggcgacctacgtgaagaagggcgccactcagggcggttcctcgctgacccagcagtacgtcaagaacgtgctgctgctgcaggcgcaggaggacaacgatccgatcgccgaataccatgcatccgaggagaccgtggcgcgtaagctgcgcgaaatgctcatcgccgtgcagatggagaagacgtattcgaaactggagattctgcagggctatctcaacatcgcgcagttcggccgtggcatttacggcgtggaaatggccgcgcgacgatacttcagcaccacggccgacaagcttgacatcgtgcaggcggccaccatcgccgcgatcacgaagaacccggcggccttcgatccctcggtggagagcaaccagaaggcctcacagagggagcgcaacatcgtgcttgacctgatgtatcaggaagagtacatcagccaaaagcagcgtgacgaggccaaggcgaagccgctgaaggacacgctgaaactgcaggatgcgcaggcggggtgcagcgcgtccggcgacgcggcgttcttctgcgactacgtcaccaagaagatcctcaactcgaaggagttcggcaagaccatcgaagagcgcaagaagctgctgtatgagggcggcctcgacatctacacgacgatggacgtcaatgcgaactctgcggcgatgaaggccgcgcgtgcggccatcccggcggacgacgcgagcaagatggaagtgatgatggcggccatcaagcccggcaccggcgaggtgcttggcttcggcatcaacaagatatacgacacgtcgccggaagcgaacaacgatccggccagaaccgccatgaacttcgccgtggaccagatagacggcggcggtagcggcttcccggtcggctccacatggaagccgatcaacctggtggcctggatgcgcaaggggcactcgatcaacgaggtgctgccggctccgggcgtcgtgaacctataccgtgacattcccggcttccgcggcgtcaatacctgggacgtgaagaactccggcggcacgcccggatacgcggaatccccgctcgacggtctggtcaactcgcacaacaccacgcaggccgccatggcgaaggtcatcggcctcgaacccatcgcgcaggccgccgaggacatgggcttccatcaggcgtccaagcagaagatgaacatgcatctgaaggacgacgccgcgaacggcggcgcctatcaggccccgctggtcatcggtggtacggtgtccgccgcgccgctgaccatggcgaacgtgtacgcgaccatcgccgcgaagggcgtcgaatgcacgcccatcgccatcaagaaggtcaccgacgccaccggtgccgagcttgatgtgcccaaggcgaactgccatcaggccgtcgacccggatatcgccgaaaccgtcgcctacgcgatgaaccagggcgtcgtgcgccccaacggccaggcgaggaccgcccagctcgccaacaaccgcaagacgttcgccaagaccggtaccaacgagaacacgtacatgctgacaggcggattcgtgccgcagatcgccgcgttcgtcgccgtgggcaacgccgacggcaacagcgacttcgacaacaagaccattaacggcgtataccaccgcacatggttcggttcctatatcgcgaccccgacgtggaagaacttcatggacacgtatctcaccgcgatcaatgcgcccaacgtcgattacggcacgccgtcaagcaagtactcggcaacctcgaattcgacctcgaaatcgtcaaggtcgagtaccagcacgacagacgggacgaccagcggaaccggcggaacgggcgataccagcggccagtacacgcagacgcagaacgacacgaccaccggcggcaatcagaccgagggcggccagaccaccggcgggcagtgacgggcggtggttcggtagctgagccggtgagctgagccggtgagctgagccggcgggccgatgcaccgaaagcggcggttcgccgcgtgagtcaggggccgtatgagcatgaacgctcatacggcccctgcctgatttccgacgctttgcgcaggcggagaacatcggtgcacgagtcgtgcttgagtctgtgcgcggtgagatgattagaccggtggttgcctcgccgtggtttggaagcatcccgacttcccggctcgcggattgggagccatgcgaattgtcgaggaaaggacgaccatgaacgctgaggggaagaagaaggccaagggcggcaaagggggagtgcagctgttccagccgatgacgttgcgcggcgttaccatgcgcaaccgcatctggctgccgccgatggacacgtattcggcggtggcgcgggacggcaagcccacgccgttccattaccagcattatgtgtcccgcgcgatgggcggattcggcatgatcatcgccgaggccaccgcggtgacggccgacgggcgtatctcgccgcgcgatgtgggactgtggaacgacgatcaggtcgccgcttggcattggatcgtcgacggcatcaagcaggccggcgcggtggcggccgtgcagctcaaccatgccggacgcaaggggtcgaccggctgcttcggcgtcggtttcgaggggaagagtgtgcccgaggatgccggcggatggcgtacggtcgcgccgagcccgatcgcgtaccgtgggctcaccgatccgcgcgcgttgagcgtcgaagagattcacggtctggtttcggcgttccgggatgccgcgcagcgtgcggtgcgggccggtttcgaggcgattgagattcatgcggcgcatgggtatctgatctcgcagttccttgacccgctgtgcaacgagcgcgcggacgagtacggcggcgatatccacggccgcatgcggttcctgctggaggtcgccgatgcgattcgcgaggtgattcccgacacggtgccgctgctggtgcgcatttcggccacggactgggccgcgggtggctgggatctcgatcagacggtcgataccgcgtgcgtgctgaagcagcacggcgtggacctgatggatgtgtccaccggcggcatcatcgccgacgtgagtattccggtcaaggccaactaccaggtgccgttctccgatcaggtgcgcgaacgcgccgcaataccgaccaccaccgtcggcctgatcaccaagccgaagcaggcggagaagattctgcgtgcggggcaggccgatgcggtcgagattggccgtgccgcgctgcgtgacccgtactggccgctgcgcgccgccgccaagctcggcgtgcccgtctccaaggcaccctaccagccgcagtacatccgcggcgccttccctgaggactgagcggcagataaacgtagaccacctccagtcatgctacgcatgactggaggtggtctatggctgcgtcgatcaggcgtcgatgccgacggcgtcgctgatgtgctcgaagccgtcgcgcttgaggagcgccgcgaggccgcgcttgagtacggtgatctgctgcggtccgcggtacatcagtgcgctgatgaacatgaccaggctggcgccgttgcgaatcttgcgatatgcctgctgcggggtgaacacgccgccgatgccggcgatggcgaaacgctcgccgtattcacggtagacctgcgcgatgcgctcctcgctggccaccgtgcacgggccgccggacaggccgccctcccactgctgcggaatctccaggccggtgcggtccttctggaggttggcgatgctcagcccctgcacgttgtgctcggcaagcacgtcgagcaggtccttgaactcgggccacgtcttgttgagcggcatcttgaccagcgtcggctgcgggcgttcgatcttgtcgagctcggtgaacaggcggtcgagcgcgtccgggtcggcggtgaacggctcgccggcatgggtgttcgggcatgacacgttgacctcgaccatggcgctgcgtccggccgcgcggcgcatggagatgcagtagtcctcgatgccttcgtccaggtcgccgcacttgtcgtcgttggtgcgtgcgatggagacggacacctgcatcgtcttcgcgttcgtccacgcctgctccgcgcggtcgatcaccttgtcggacccgtcgttggcaaggcccacgtgcaccatcatcgaatcgtattccggaagacggtggaaccacggcttcgggttgccggcgctggcgcgggaggtcgtggagccgaccgtctcgaagccgaagccgacgttgtccatgagcacaggcatgtcgcagttcttgtcgaggccggcggacaggccgaacgggttggcgaagtcgacgcccatcactgtggtctccagcacggggtcggtgtagtcgagcatctcgcgaagcagccacatgagcggcgggatgcgtttggtgacgttgcagaactcgatcatctggtcgtgcgccacatcgggggtgtggttgaagacgaaattgggtttgatgatgttcttgtaaccgaaagtgaacaggtcggtggttgctttgttcaccgcgtcgtgccagaagttttccgaaacataagccatgccctccattgtgtcacgcacgcgaaaaaacggcaacgatgcggttgcgcgggtgcggtcggatccggcgggtgggggagagtgcggtaaaagtgatgttttgttcgtttttatggaagtaatgtgcgcaacacgcatgtcaaacattacgaaacgcacatattggtttggtttatgcgcgaacatgtgcgataatgttcacatgatatcctcacaacgtcaacatttgatactgagccgtctgcgtacgcgcggcgcagtgcgcatcacggcgttgtctaaggagctcggcgtttccgcgatgaccattcgacgtgacatcgccgatctctctgacaaaggtctgctgaaacgcgtgcatggcggtgccgtcagcaccagcgcattgctcagcgagccgctgttctctgtaaagtcgcagatggacattggtctcaaggacgccatcgcacgtgaagcggtgcaatatgtggcccccggcgatgtgatcgccataggaggcggcaccacggcctacgtgttcgcgcagcatctgctggaaagccagcaggcgtcgggcatcaccatcctcaccaactcgattccggtcgccgagctcgtgcaggcgttggaatccaaggatgtggaggtgatcgtaacgggcggtgtcaccacgcggtcgaactcgctggtcgggccgatcgccgacaaggtcatcgcgtcgctgcgcgtcaacaccgtgtttctcggcacccattccgtgtcgattccccgtggcttcctcatgccgaactcgctggaggcggccaccgacatggcgatgatgggcatcgccgaccgtacggtcatcctgaccgaccacaccaagtggagctgtacatcactatcgttgttcgcccggttcgaccaggtggacacggtcatcaccgacgatggcctcgaccacgagtccatcgccaagacaagggatttggtaaaggaactcgttctggcgcaccagagcgaacacaccgaagaaagtgagtgacaccatggcagaaatcaccaactacaccccgggagagtatgcgaaggagcatatccgcatcacgccgaccacgctggccgacggacgcgacttcttctatctcgacgacgatccggaatacgtctccggcgccaagacccgcgagctcaaggacccgcgcccgctggactaccgcttcgccccgcacctggacgccgacggcaacgaagtgccgtacgccgccccgcagatgcgccgcgacccgctgaccggcgactggatcccgatggctaccgcccgcatgaaccgcccgatcaccgccggccccggcgccaccgccaagggcaacccgctggccgcgcgcaagcccggcgacccgtaccaggacggcgaggtgccggacaccgactacaacgtcgtcgtgttcgagaaccgtttcccgtcgatggtgcgtgtgcccggtgtctccgaagacgtcacctacgtcgacggcaacccgctgtgggagaagaagctcgcagccggccgctgcgaggtcatctgcttcgacccgaacgaggacggcctgccggccgacctgccggtgtcccgcctgcgcacggttgttgaggcatgggccttccgtaccgccgagatctccaagatggaaggcatcgagcagatcttcccgttcgagaaccacggtgccgagatcggcgtctccctcgcccacccgcacggccaggtctactgctacccgttcatcgccccgaagatggagaaggaactccagcacaccgaggcctaccatgagaagaccggcggcaacctgctcaaggacatcatgaacgccgagctcgaagccgaggagcgcgtcgtgatgcgcaaccacagctgggtcgcctacgtgccggccgccgcccgctggccccttgaggttcatgtggctccggtgcgcgacgtgctcaccctcgaccagctcaacgaccaggagcgctgggacctcgcctcgatgtactcgcaccttctgaagcgtggcaacgcgttcttcgacaagggcgacggcaagggcatggacctgccgtacatcgccgcctggcaccaggccccgatccacgacgcgcgtcgcgagaactaccgcctgaacctgcagttcttctcgttccgccgcgccgccaacaagatcaagtacctcgccggctccgagtccggcatggccgcctggatctccgacaccaccccggagctcatcgccaagcgcttccatgagcttggacagatcgacatctccgactgacgacgttctatgggggagtctggccgaaccgggctcccccaagcaatatccactgcatatatagccatcacacagaagaaagaacaccaatgactgctgttgaattcattgagccgttgtcccgcgaggatggtgtctcacgggcgacgaagctgttcgtcgatatgtatgccaccgcgcccgagggcgtgtgggccgctcccggccgcgtgaacctgatcggcgagcacaccgactacaacgcgggcctgtgcctgccgatcgcgctgccgcaccgcacgttcatcgcgctcaagccgcgcgaggacaccaaagtccgcgtcgtctccgacgtggcgcccgacaaggttgccgaggccgacctcgacggcctcaaagcccgtggcgtggacggctggtccgcctacccgaccggcgtggcctgggcccttcgcgaggccggtttctcgcaggtcaagggcttcgacgccgcgttcgtgtcctgcgtgccgctgggatcgggcctgagctcgtccgccgccatgacctgctcgaccgcgctggccctggacgacgtgtatggtctcggctacggctcctccgacgcgggccgcgtgacgctgatcaacgccgcgatcaagtccgagaacgacatggccggcgcctccaccggcggcctcgaccagaacgcctcgatgcgctgcaccgaaggccacgcgctgctgcttgactgccgcccggagctcaccccgctggagaacgtttcccagcaggccttcgacctcgacaagtacggtctggagctgctggtggtcgacacccaggcgccgcaccagctcaacgacggccagtacgcccagcgtcgcgccacctgcgaggaggccgcccgcattctcggcgtcgccaatctgcgcgtcgccgccgatggcatctccaaggccgacgaccagttccaggcgctcaaggagacgctggatgccctgcccgacgtgacgatgaagaagcgcgtgcgccacgtcgtcaccgagatcgagcgcgtgcgctccttcgtgcgtgcgttcgcccagggcgacatcgaggccgccggccgtctgttcaacgcctctcatgattcgctcgccgcggattacgaggtcaccgtgcccgagctggatgtcgcggtggatgtggcccgcaagaatggcgcctacggtgcgcgcatgaccggcggcggcttcggcggctccatcatcgcgctcgtcgacaagggtcgcagccaggaagtcgcgcagaagatcgccgacgagttcgaggctcgtggcttccatgcgccgcgcgccctgccggcggttgccgcgcccagcgccagtcgcgaggcctgattatcgcagcgaacggttctcaataagaaacgtgcgaggattcctcacaaaagcgcacatatgaacaatcggcggaagcccggaattccggacttccgccgattgttttgttcgtttcgcgcgcgatgaggctcgcacctttcttattgagaaccgttcgctgcgacaaccaaaaaagggagcggatttcgccgctcccttttttatctatctcagatcacttctcgtaatcctcgtccttgctttccttgatcaggaacagggcgatcagggcgagcaaggacatcacggcgaggtaccagccgacggactcgacggcgtcggtcgacttgaccagtgcggtggagatggccggggcgaacgcgccgccgaggatggcggcgaggttgtagctcaggccggcgccggagtaacgcacgtgagtcgggaacagctcgggcagataggcgccgcaggggccgaacaggccgcccatcagcgcgaagccgacgcataggaacagcatcacggtcaggacgttgtgttgcagggactgcatggcgaacagactgaacaccagcgtcgcgagcgtggtggagatcagcacggtcttgcggccgagcttgtcggagtagatgcaggtcacgaagatgaagatcgcgaagaacaccacggaaaccatctgcatggccaggtattcgttctggctgaagggtggcttcatgaccttgacggcgtagctcagcgaccacgtgcccagcacgtagaacagcgagtatgtgatgcccatggcgaaggtgccgagaagcacttccttccagtacggcagcagcgagcgcagcgggtgcttcaccacgcggtcctgctcgactgccttgcggaagatcggggtctcggtcatgcgcagacgcacgtacaggccgatgatgacgagcactgcggagcacaggaatgggatacgccagccccaggcctgcatggccgtggatccgagcgtggagtcgagcagcaggttcaggccgtaggcgcagaagaagccgatcggggcgccgaggttcgggaaggagccgtacagggcgcgcttgttggccggggcgttctcggtagcgaccagcgcggcaccggaccattcgccggcgaggcccacgccctggcaggcgcggcagatgcacaggatgacgatggacaaggcgcccagctgctcatagccgggcagcaggccgacgacgaacgtggagatacccatcgtcatcagggcgacgaccagcgtggtcttgcggccgatcttgtcgccgaagtggccgaacagcatggagccgaacgggcgggcgaggaacgagacggcgaacgtcaggaacgcgtacatcgtgcccagcgccggattggccttcgacgcggccgggaagaaaatagtgccgaaatagctggcggctgcgatggaatagcagtagttgtcgtagaactcgatggcggtgccgaccatggaggcggcgatgatctcgggaaccgagtccttcttcaccgcaccggccttggacacggccgcggtagcagtagcagacatgaaagtctaacccctctaattcattcaatctctgatacgagccgacgccgcgaccgattgtgcggtgcgtggtcgatatgctcacgggtagcggggtgcgtgggcgtcgtcgcccgagcttgtggctccagcgatgcgctcacacaccgctgtgcttgatgtaaaggtgtagtcgacttatgaaagcgatggtaatactgctcacattgtggacgattgtccgtttgcgcctggatgatccccgcgtgaacaatgccgacgtcggattcggccgatggcctgcggacacgcccaaatggacggttcggcagtatttcacgcccgctccatatacttgacactacttgcagtaatcggtttcgagcgggggagtcccatgaacaaggcaatcatcaccgtcgtcggccaggacacggtcggcatcatcgcgcgcgtgtgcacgtacctgtccgatcacaaggtcaacgtgctggatatctcacagaccatcatcgacggcttcttcaacatgatgatgatcgtcgactactccggcgcggacaacgagttcggcgtgatcgtcgaggacctggacaagctcggcgagcagatcggcgtgcgcatccgctgccagcgcgaggagatcttcacgaagatgcaccgcgtctgagtctcgaaaggaacgaatcatgctgaatatcatggaggtccgtgagaccaaccagatgatcgagcaggagaagcttgacgtgcgcaccatcacgatgggcatctcgctgcttgactgcgcggcggacagcgtcgacaaggtgtgcgacaacatctacgacaagatcactacctacgccaaggacctggtcgccaccggcgaggcgatcgagcgggactacggcatcccgatcgtcaacaagcgcatcaccgtcaccccgatctcgctggtcggcgcgagctcgtgcaagagcgaggacgatttcgtcaagatcgcgcacgcgctcgatcgtgccgccaagaaagtcggcgtcgacctgatcggcggctattccgcactggtgtcgaagtccatgacccccgccgaggagctgctgatccgctcgctgcccaaggcgctgagcgagaccgacatcgtctgctcgtccgtcaacgtcggctccaccaagaccggcatcgacatgaacgccgtcgaactgctcggccacatcatcaaggacatcgccgcgcgcaccgctgacaacgactcctacggatgcgtcaagttcgtcgccttctgcaacgtgcccgacgacaacccgttcatggcgggcggtttccacggcgtgaccgaaggcgatgcggtcatcaacgtcggcgtgtctggccccggcgtggtgtctcgcgcgctcgacgcggcggtcggccgtgatttcgagttcctgtgcgagacaatcaagcgtaccgcgttcaagatcacgcgcgtcggccagctcgtggctcaggaggcctcgcgccgcctcggcatcccgttcggcatcatcgacctgtcgctggctccgacgcccgcggtcggcgattcggtcggcgaagtgctggagaagatcggcctggagcaggtcggcgctcccggcaccacggcggcgttggcaatgctcaacgaccaggtcaagaagggcggcatcatggcgtcgagctacgtcggcggtctgtccggcgcgttcatccccgtctctgaggacaagaacatgatcgacgcggcggcatccggctgcctgacgctggagaagctggaggccatgacctgcgtgtgctcggtcggccttgacatgatcgccatccccggcgacaccagcgccgccacgatctccggcatgatcgccgacgaggccgccatcggcatggtaaaccagaagaccaccgccgtgcgcgtgatccccgtagcgggcaagggcgttggcgagatggccaacttcggcggtctgatgggctacgctccgatcatgccggtgaaccagacgagctgcgaggcgttcgtgacccgcggcggccgtatcccggccccgatccacagcttcaagaactgacgggctgcgcggcggttcggtgcgccagcggtcctttgccttgccccacctgtatggccgttcgttactcatgatggacggccatacagtttttgtgatcatctcgaatagtcactttgaccatggcataatgaacatgtgaacgatacaaatgattccagcacatctcggtatgtcaggctctttcgtgcgatccatgccgcttcaggtcgtttgctgacgaggagcgaacgcgtccgttggatgtttcctgtgtgcgtagctgttgccgcaatacttgccacggtactcagtttcttcatgggaaggaatcagtcgatatggttcgatgagggatattcattgctgatatgcggtcggtcatggagggacatgctcgcacttacggcagtggatgtgcatccgcctctatattatgtggctctgaaactgtggatgaacttggtcggcggcgatgtgcctctcatgcggctgttgggatgtctgttcttgggagcatgcattgccgccatggcgttgttgctgaggcgcatgttcggaacacgcgtgacgatgctgtgcctgcctgttctaaccgttggtgttttcgcgttgcgtttcggttatgagctgcgcatgtattcgcttgcgtctttgctctccgtgttcggcacatacgcactgctgcgggctgttgacgattccccgatgtttgctacagccagcgccggcgcgggtaagaacatccgagtcgacgaggatgcaaggctggccgcgaatacgacgggaaatgacggattcgcagttcctgaggaacatacggggaaaagtcgtttgcgctggtgggtaatttacggcgtgatcgtggcgctgggcatgtatacgttatatctgaccgcattgatttggatgacgcatgtgatttggcttacatgcctcgcctgccgtgtggttcacaggtctcgggccagtctggtttctgtgggcggtcaggatagacgagaggacgtccccaggcgttaccgggcatggcgatgggtattcgtgtatgtgttctcggtaattctgtacgttccgtggatgccgtttttgattaaccaaatgtcgcatccggcattgcctcctgttacccggcagctgaatatggcacagatggcgtctatttacagtgccatgatggtggggctgcctgaaaagaacataccggctttggtttcgctgattctgatgtgcattgtggctggcattgcagtgttgctcgctaagtttcatttccgtagttcacttacgggacgttcgttgagcatgctctcactgctgtatgctctgtttggctttcctgtgatgtcgatggccttgtactcgtcggtcaaggagctaatcatgcatggctccggctttttctcgatacggtactgcagtctattgtgcatgtttttttatgcggcacttgccgccacattcgcactaggcattgcatatcgtgggaacaggaaaagcgtccccattcgtagcgagacgacatcggcagaaggaacgatgaccgaattgcatgttcggataatctccgctgtaacatatgcgattaccttagcggttttgacagccggagtagcgtcattgtggtcgctcggcaatttcaattatgattcctcatccgtcccggcttcccgacagctgagctctcaggtaacgtgttcgcgggaacaccctgtagtggcagtcaatgaatacgcgtacatagaggccgcctactactaccgtgattgccggtattatcgtttctacgattccgggaatgtatccgaacgaggcggttatgcgcctttgagaggttcaggggcacagctgcgtaatgtcaatgatcttactggtgctgagggtttcactttgctgacgaacagaaaaaccatgtatggtggcatatcctctgatcaattcatcagggattcgatcatcatggaacatgacaatgtggctgttaaatatcatcttcgacactaatcagaccggaaatcccagggctggaaacatgtgatttaaagcttgtacggggcttgagagcatagctatcgtgtgttcgtgcggccgtatgaccatgagacgtgggccttgtgggtcttcgacgtgcatcggtagatgttgtcgtcacgccgccttgctgactttgccctgtaccaggcgcggttctgacatggtcgtgggctcggctggggttcgcagatggccgggcgtgattctggagcggtctcgtcctcgattgtgtgccacaccagggcgaaaatgggtgttttgagcctagtgtggcacaatttgtgccacagaatgaaatgtaagcgcctagaatccatgtcgtggcagttggttgtttcacgatattgttggaaaatggccgaaaccgtatgccgtagataattgatgccgaaatcgcctgtgccataccaaggcaaaaatgggtgtttttgccctggtatggcacgcaatccgcgacttgtctcatggatcgagacaagatatatcggatattgattcaagcggtgagtggaatggttgcgctgtttaaaccacgcctccgagggcttcatgccgaccgggaaatgcatcgtgacgtggaaatcgtcatggattgcgaggtataaggggctacacatacgctaacaacgcgtcactgtgcgtgggcagcgtcactgtgcgtgtgcccacgcacagtgacgtaccggcaaacccttgatattgcaatgtttttcaggaatcgtcactgagtgtgcgtccacgcacagtgacgacttccacgcacagtgacgcacttcgtgctcgcgcactgccggcaattgtgattttgcctcgcgaggctcatggtttcctcgctcgtccctgtcgggacttgctcggcgtcgctactcggaagcccactgggcttcctccctacgctccgcccttgaaccctagttggcgccaggcttcgtagatggcgatggaggcgcagttggtgaggttcaggctgcgcaggctcgggcgcatcggcagccgcacctgctcggccacgtgcgggccggccatgatgtccatcgggtcgggaatgtcgcccggctccggcccgaacagcagaatgtcggtcggcttgtactcgacctcggtatacagtttcgtcgcatgcgcggtgaacgcgatgatgcgcgaatccggcatcgactcgaccagattgtcgaagttcggatgcaacaccacgtgagccatgtcatgatagtcaagcccggcacgacgcagcttggtatcgcgaagattgaaccccagcggctccaccagatgcaggatggtgccggtcaccgcacacaggcgaatcgccgacccggtattgccggggatgcgcggactgtaatagcacagatgcggcgtgaccgtctccgtcgcggcagccttctcggccgacagcatcgcgtccacaacgctgatcggattgccgtgcgcgtcggtcaccagctcgtcgggaccataattcgacttgcggtagccgtactcgaacatcttctcgaccttcgcctcggcctcttccgcacccttggtttcgctcatcatcccgccttgtctctgccggttgtcttcgaccttcgagcttaaaacagcccatacccgtaacagctgctcgaaggagagaccatgagacaattattccgccgtatcacgaccatatccgccacatgcgcgttggccgtttcggctgcagccgcagtcgcggtggccgccgaacccaccacaggcaatatacttaccggcaaactgcccacgaccaacagcacgcatctgatcggcgacggcgactccaccgcgtcgaacgtgctgatctagaacgcggccgccgccaccgacggcgacaccggattcgacccgaccgacagcaacatcaccaaaatcatcgccggagaagagaacggcagcgcggaaaacaacggatacgccagctgggacgacgtatacctgcaatatgatttcggcgagccgagagagatacactccatcaacctgtaccgcaatgggtatgagaacgcgctgaacacgttcaagcgcatcaaggtcgaagtgtcctccaacgaggacttctccgacgcgaacgtgctgttcggcaccgccgacgtcgaggaaaccgccgcgaccaagctcgccgcgcagaccatcaacctgaccacgcccgtcaccgcgcggtacgtgcgcatctggcagaagggccattgcatccagaacacgaactcctcatggaagggatacggcaacggcgtgggcttgcgcgaaatcgaggtcatcgacaagctcaaggacggcgagaccctgccggacgcgcaggagacgcgcaacatcgcgctcggcaagttgccgtatgtgtacggcctcgacccgaccaacatcgcggcgatcagcgacggcaagcaagacgacaactacgccgtgcacaacagcaccggcgagcggcggctgcagttcgaatacaagaaccgctaccgcatccacgagggctcaagccgggcacctatccgctggcccgcataggcgtgtcgtcgacgcccacgtcggccggcaaggacgtcgacggcatgcattcgcgaccgatgttcccgattctggagacgcaggtcggcgacggctgggtcggcgacatcgactacacgaagcaggacacgaagcaggacagcaatttcctcgtcgactgggtgcgcgtgtaccaatccgaggggcagccggtgacgcgtttcgacgacctggacggcgccgagagcggcgcgtaccggatcgcccccgcctcacggaccgaggggctgaccgcagtgagcaacggcgacgccgcctggcagaacaagaacaacttctactacggcggacagccgcggtatgagaccagctgttcccatgccgtgcccctgatgcagggccgattcgccctgcgcttgcggggcccacaaacactctgccgaatccggacgaatgcttttacccgcagcgagcgacccgttgcaggtaaggttgtgccaccgaatcggcggaatcgcgcggcgccgtgatgatgtagcggtcgccgtgcacaatggagcgatgccagagatacggaacgatacgccggccgaacctgtgggcgagtgcgctgtgcctcgcgtgcgggcgctgctgtccgcatggtgggaggccaacgcccgcgacctgccgtggcgattcgggcgcgcgacgccttggggcgtgctggtgagcgaggtgatgagccagcagacccagatgagtcgggtggtgccgtactggactgactggatgcgcgtgtggccggacgtcaccgcgctcgcgggggcctccacggcggaggtcatcaccgcgtgggggcggctcggctacccgcgccgggcgttgcggctgcaggagtgcgcccgcgtggtgttcgagcaataccacggccggcttccgcaaacctacgacgagctgaccgcgttgccgggcattggcgactacaccgcctcggcggtgctgagcttcgccttcggcgtgcgcatcgcagtggtggacaccaacatccgccgggtgctgtcgcgcgtattcctcggagtcgaatcgcgcgggggagcggccagtccggccgagcgggcgctcgccggcagggtccttccacaggatgatgagacggacgttcgtgatgccatcgaagccgcgaatgcccgcgagacggtgaacgcccccgaatccgcaatccgcgagatgacgcagcgcagcacccgcccgtcggtcatatggaaccagtccgtgatggagctcggcgcgctggtgtgcacggccaagaacccgctgtgtgaccagtgcccgatcggtgagcattgcgcgttcctcgcggcgggccgccccgggctgggagagcgacgcacccgcccgcgccagcgtttccaaggcaccgaccgtcaggtgcgcggcatcatcctcgacgcgctgcgcgctgagccaatcctcgcccgcgaacgcctggaatccctgtggccggatcacgtccagctcgacaaatgcatcgcctccctcgacgacgatggcctggtcgacatgctcccggatggttcattgcggttaccccaataagtgcgctctcaaaactcgcagatagagggggttaatccccgaaaacccctctatctgcgagttttgagagcgtgcctgaggtagactggacggcatgcccactcagcccacccgtcagccgcgacccggttcgcggcaaaagccgcgcaagcgcgtcgtcagcccgcaacgacgggcgatgtaccgtcgccgccgtgcggtcgcgctggtcgttgtgctggccgcggtctcgctggtggtgttctgcgtgtacagtctcggccgcggcgtggcggatggcgtgagcctgctgcgtcccacaccgatcgcgcgtgaatcggtgccggcgccgaagaagaccagcggcgtcaatgattgtggcgcgtccgatgtgaagctgtcgctgacggcggcttcccaaggcgttccggtgggaggttccctggacttcacggcgagcatcagctatgaaggcacgtcgagctgcctgctggatctgtcggatgtggtgctgacggtgtcgtccggcgaccagacgatatacagttcggactcctgccccgctgacccgaaccgtcagctgctggcgaagaccagcgacatgaacaggacgtcgcagaagatgacatggggcgcctcccgcacgggggaccagtgcgtggaggatcagaacaaactgccgaaggtggaccgtggcacatataccgcgcagttgagtctgaagaacgcgcacaaggcggtcagcgatccggtcaccatccaggtgcagtgacggtcaggtgcggtgacggccttgagcgggccgctcgccgcgggctcggcggttgccgcgtccggccgcagcgtgcggcgtgtcgcgcatgtgatgtatgttgcgccgacggctgatttgtgctaaaatttggaatttgcgtaagtgcatgtcatatagcgggcatgtcgacaaagatgaaacgcccgcgattcggcatatggtggccatctgcggcgtttccgggaacatatcgataacgacattagcgagcgataaggaacgtccattggctgacactcaagctacgacgaataccaccaccatcatcgcacgcgccgaccagcatgacattgatctgcacaaggcgtcggaccgtgtgaatttcggctccatccgcgagcccatccccgtgccctacctgctgggcgtgcagaccgacagcttcgactggctgatcggcaacgagcgttggaagaagcgcgtcgaggaggacgaggcgaacggcaccgacaccgttccccacatgtccggccttgacgaggtcttcaacgagatctccccgatcgagaacttcgcgcagaccatgagcctgacgttctccgagccgtacttcgaggagccccgccacaccgtgcaggaatgcaaggagaaggattacacctactcggcgccgctgtacgtcaacgccgaattcgagaacggcgacaccggcgagatcaagtcccagaccgtgttcatgggcgacttcccgctgcagaccccgcacggcaccttcatcatcggcggcaccgagcgagtgatcgtctcccagctcgtgcgctccccgggcgtctacttcgaccgcagccgggaccgcgccaccggcaaggagatcttcggcgcgaagatcatcccgagccgcggcgcatggctggagttcgagatcgacaagcgtgacgtgctcggcgtgcgtgtcgaccgcaagcgcaagcagtccgcgatcgtcttcctgatggccatcggcatgaccaagcccgagatccgtgatgcgttcgaaggctactcgctcgtgctcgacgcgctggagaaggagaccatcgagacacaggacgaggccctgaccgacctgtaccgcaagatccgcccgtccgacaccgccaccccggaggccggacgcaacctgctcgactccttctacttcaacaccaagcgctacgacctggcccgcgtcggccgctacaagatcgaccgcaagcttggcctggagcacgagatcaacgaccgctccctgagccgcgacgacatcatcgccaccctgaagtacctggtcaccctgcacgacggcggcaagaccttcccgggcaagcgcaacggcgaggatgtcgacctgcacgtggacgtggacgatatcgatcacttcggaaaccgtcgtatccgccaggtcggcgagctgatccagaaccagctgcgcaccggcctgagccgtatggagcgcgtcgtgcgcgagcgcatgaccacgcaggacgccgaggccatcaccccgcagtccctgatcaacatccgccccgtgaacgcgaccatcaaggagttcttcggaacctcccagctgtcccagttcatggaccagaacaacccgctggccggcgtgaccaacaagcgccgtctgtccgccctgggccccggcggcctgtcgcgcgaccgcgcatcgatggaagtgcgagacgtgcacgcctcccacttcggccgtatgtgcccgatcgagtcccctgaaggcccgaacatcggtctgatcggctcgctggcgacgttcggccgcgtgaacccgttcggtttcatcgaaacgccgtaccgcaaggtcgtcgacggccagatcaccgatgaagtggtgcacatgaccgctgatcaggaagtcggccacgtcatcgcccaggtgaaccaggagatcgacgagaacggtcggttcgtcaacagccaggcccttgcccgtaaggacgaggaagaggcggtcgatgtcccggtcagcgaagtcgacctgatggacgtgtcgccgcgtcagatggtctcgatcggctcctccctgatcccgttcctggagcacgacgagggccaccgagcgctgatgggtaccaacatgcagcgtcaggccgtgccgctgatcgagtccgagcgcccgctggtgggcaccggctccgaatggcgcgtcgcctacgattccggtgacgtcatcatcgccgacaagccgggcgtggtcacctacgtgtccgccgacatcatccgcgtgatgaacgacgacggcaccatcagctcctacaagctgtccaagttccagcgttccaaccagaccacctgctacaaccagcgcccgatcatcaaggacggcgagcgcgtcgaggccggcaccgtgctggctgacggccctgccatccagaagggtgacctggccctcggcaagaacctgctcatcgcgttcatgccgtggaacggctacaactacgaggacgccgtgatcatctcgcagcgcctcgtgcaggacgacaccctgagctccatccacatcgaggagtacgagatcgatgcccgcgagaccaagctgggcgccgaggagatcacccgcgatctgccgaacgtcggcgaggacgcggtggccaacctcgacgagcgaggcatcatccgcatcggcgccgaggtcgaggccggcgacatcctcgtcggcaaggtcactccgaagggcgagaccgagctgaccccggaggagcgcctgctgcgcgccatcttcggagagaagtcccgcgaggtgcgcgacacgtcgctgcgcgtgccccacggcgagaccggtactgtcatcgcggtcaaggagatcacccgcgaggacgccgaggaggacggcgacgagctgcccaacggcgtcaaccagatgatccgcgtgtacatcgcgcaacaccgcaagatcaccgtgggcgacaagctgtccggccgccacggcaacaagggctgcatctcgcgcatcctgcccgaggaggacatgccgttcctggcggacggcaccccggtcgacatcatgctcaacccgctgggcgtgccttcgcgaatgaacctcggccaggtgctggaactgcacctcggctggatcgcgcactccggctgggacatcagcctcgaccccgatctggaggccgagtggaagaagtacgtgcccaagggcgccgaaaagggcgctccgaacacgccggtcgccacgcccgtcttcgacggcgtgcgccccgacgtcatcaagggcctgctcaagtccaccctgccgaaccgcgacggcgaccagatggtcggcgaggacggcaaggcgcgcctgttcgacggtcgcaccggcgaaccgttcccgaagccgatctccgtgggctacatgtacatgctgaagctgcaccacttggtcgacgacaagatccacgcccgttccaccggcccatactcgatgatcacccagcagccgctgggcggtaaggctcagttcggtggccagcgcttcggcgagatggaggtgtgggcccttgaggcctacggtgccgcctacacgctgcacgagatgatgaccaccaagtccgacgacgtggacggccgcgtgcgcgtctacggtgccatcgtcaagggcgagaacctcccgccggcaggcatccccgaatcgttcaaggtgctcctgaaggaaatgcagtccctgtccctgaacgtcgaagtgctcaacgccgaaggcgtcgccatcgacatgaaggacgaggacgacgatccctcctccagcgctgacctgggcttcaacatcggcgcacgccccgacgccgccgccaaggaagaccagaaggccccggaacccgaataccagtgattccccacgggtcgtccggcccgcggccgcgcagcgaacgcgcggcgcggcgggccggacgacccggacgaaacgtgattgaacatcaatttcaaagacaggacaatacagagtgctggacgtcaacgcatttgacaaactgaggatcggcctggccaccgccgacgacatccgcaattggagccacggcgaggtcaagaagccggaaaccattaactaccgtaccctgaagcccgagaaggacggtctgttcggcgagcagatcttcggacccacccgcgactgggagtgcgcctgcggcaagtacaagcgcgtgcgcttcaagggcatcatctgcgaacggtgcggcgtggaggtcaccaagtcccgcgtgcgccgcgagcgcatgggccacatcgagctggccgcccccgtcacccacatctggttcttcaagggcgtgccgagccgtctcggctacctgctggacatcgctccgaaggacctggagaaggtcatctacttcgcggcctacatggtcacgagcgtggatgaggagcagcgccacaacgacctgcccgacctgcaggacgagttcgataccgagatcggcaacatggccaagcgccgtgacaacgagatcgagaaccgcgcccgcaaggtcgaggaggatctcgcccagcttgaggccgaaggcgagggcaggggccccgcacgcaccaagctgcgcaacggcgccgagcgcgacatggccgccatccgccagcgttacgacgatcagatccagcgtctgaacgccgtgttcgaccgtttcaagagcctgaagccgggcgacttggaaggcgacgtggacctgtggcgcgagatgcaggaccgctacggcgactacttcgagggttgtatgggtgcagaagccatccagaagcgcctgcaggacttcgacctggaggccgcctccaagcagctgcgcgaggagatcgactccggctccggccagcgcaaggcccgcgccctcaagcgcctgaaggtcgtcaacgccttcctgaccaccggcaacaagccggaggccatggtgctgaccgtcatcccggtcatcccgccggacctgcgcccgatggtgcagctcgacggtggccgcttcgcgacctccgatctcaacgacctctaccgtcgcgtgatcaaccgcaacaaccgtctgaagcgcctgatcgagctcaacgcgcccgagatcatgctgaacaacgagaagcgcatgctgcaggaagccgttgactccctgttcgacaacggccgccgcggccgtcccgtcaccggcgcctcgaaccgcccgctcaagtccctttcggacatgctcaagggcaagcagggccgcttccgtcagaacctgctgggtaagcgagtcgactactccggccgttccgtgatcgtcgtcggcccgtcgctgcgcatgcaccagtgcggtctgccgaagccgatggcgctggagctgttcaagccgttcgtcatcaagcgtctggtcgacatgaacttcgcgcagaacatgaagagcgccaagcgtctcgtcgaccgcggcgactccgaggtgtggggcgtactcgaagaggtcatatccgagcatcccgtgctgctcaaccgtgcgcctacgctgcaccgtctgggcatccaggcgttcgagccgatcctggtcgaaggcaaggccatccacctgccgccgctcgcctgcgccgcgttcaacgccgacttcgacggcgaccagatggctgtccacctcccgctgagcgccgaggcacaggccgaggcccgctcgctgatgctcgcttccgacaacatcctcaagcccgccgacggccacgtcgtttccatgcctagccaggacatgatcctcggcctgtactacctgacgaccgtcatggacggcgccaagggtcagggccgcgtgttctcctcatacgctgaggcgcagatggcgctcgacctgcacgagatcgacatgcaggccgaagtgctgatccgcctgccgaaggacttcgtgctgccgaccggctgggagccccgcgagatcaccgtcgtggatccggaaccgggcagccccgacgtcgtcaaggaagagcgcttccacgacggcagcgtgctgttcgctacctccatgggccgcatcctcttcaacgagacgctgcccgtcgactacccgttcgtcaacgagcaggccaagaagaagaagctggccaagatcgtcgacgacatctccacccggtactccaccgcccaggtggccgcctcgctggatgcgctcaaggatctcggcttcacccgcgcaccttggtccggcgtgaccttcgcgttctccgacgtcgtcgagccgccggagcgtaacgagctggtcgcccagtccgaggaggaggtcgccaagatcaacgagcagtacgacctcggtttctacaccgaagaggatcgccgccaggcgatcatcgacgtgtggaccaagtgcggtgaggaagtctccaaggccatcgagaagaacttcgacccgaagaacaacctctcgatcatcgtcgagtccggtgcacgaggcaacatgacccagatcaaccagatttccggcgtgcgtggtctggtgaacaacccgaagggcgagatcattccgcgaccggtcgagtcgaactaccgccgcggactgtccgtgctggagtacttcatctccgagcacggcgctcgtaagggtctggccgataccgcactgcgtaccgcagagtctggctacctgacccgtcgtctggtggacgtctcgcaggacgtgattgtgcgcgaggaggactgcggcaccaagcgcggtctgaccatgcgcgtcgccgaccgcgacgagaacggcaacctgacgctcgtcaaggccgccgacggtggcccctactcccgtctgcttgcggccgacgtcatcgacccggctgacggcacgaccgtgctgtacaagcgcgacgacgccctgtcgatggacgtgctcaacgacctggtcgcgcacggcgtcgaagaggtgcaggcgcgttccgtcctgacctgcgagtccaagcgcggcgtgtgcgccaagtgctacggctggtcgctggccaccaacacgctggtggacgtcggcgaggccgtcggcatcgtcgctgcccagtccatcggcgagcctggtactcagctgacgttgcgttccttccactccggtggtgtggccgccgcgtccgatatcacccagggtcttccccgtgtcaccgagcttttcgaagcccgtaccccgaagggtgaggcgccgatcgccgagttcgccggcgtggtcaaggtggagaacaccgatcacggccgtcagatcacgctgacgccggacgacacgagcgtcgaaccgatcgtctacaccgacacccgtcgcgcgccgatgctggtcaagaacggcgatcacgtggccgccggcgaccagctggtcgaaggttccgtcgatccgaagaagatcctgcgcatcctcggcccgcgtgccgcccaggtcaacatcgtgaacgaagtgcacaccgtgtatcgttcccagggtgtggatatccacgacaagcacatcgaggtcatcgtgcaccagatgctgcgccgcgtcaccgtgatcgattccggtgacaccccgctgctgcctggcgagctcgtcgaccaggcgcgcttcaaggccgccaacaaggagaccatcaagaacggtggcaagccggccgccgctcgtccggagctcatgggcatcaccaaggcctcgctggcaactgactcgtggctgtccgccgcctccttccaggagacgacgcgcgtgctcaccgaagccgccctgagccagaaggtcgatgacctcaagggcctcaaggagaacgtcatcatcggtaagctcatcccggccggtactggcctcgcccgctaccagaacgccgtggtggagcccgacaaggccatccgtgacacgatctacccgaacttcgggctgggcgcggacatggacggctcgcagaccgacttctccgatgccgacctgtccgatgtggacttctccaacatcgacttcggtgacctgaagctcggcgacgacttcaatcctgacgatttcatcgatgatcagggtgggaacgacttcggcgccgactccggcaacgatctcgtctgagtcctagctctgtcctagctctgtgaaagcggggcccggaaccattgcggtggttccgggccccgctttgtcatatgcgaagcgcgggaatgtctacgggagaatgcatagacgcgaaatactccgtgaaacatcccgtgaaacattctgggtgcgcatcatcgaatcgattgcatccggtcagagtcccgttttccgtcgttggatgggactctcgccggatggtatttcacatgatggacagtgcaatatcgctactggcgctcggtgagttggaagaactggtctccgatacgcagcgtggcgggggcgtcgagttcgcgcggcttgcccttgagcacctgcgctgcctgcccgtcgcggatgatgtaggtgccgttgagggaaccgtagtcctcgatccacagcgtgccgttctgatcgatgctgatcgcggcatgattgcgcgatgtggtacgcgtcggatcctcgaccttctcggccttggcgccttcgggcacgtccatggacggcttgcgtccgagcagcgtgctcttgtcgatgacgatggtctggccggtggcgtcgttgtgcaggatgtatatcttccgcggcgccttggcggtgaaggacgacgacagcaccgtgctgtcccagtcctcgatatcgccgtcggacgagcccttggccgcatggctggcggtggaggatgagacgggggatggttccgccgctgcggaagagactgcggcaggcttgtctaccggatcgtctgcgtaccagcccagctcgggtgccgggggatagggaatcgttgccatgtcagcggctcctttcactgacgtgtggcgagggcggcgttgaccgcggggtcgttcagctgggcgagccagtcgaccagtgccgggtaggtgctggggttacgcgcgatgcaggggcgcaattccggcgcgtactgcgcgatcttggcgatgagctcctgatctgtggtctccagcgccatctgagccgtgtacccgtatggattggtggcttggggctcctgctgcgccgcgtactgcgccgccgcgtactggtcctgtgccggctgctgctgcgcggccgatgccgcatacgaatctgcggaatattggtccgcgctgtacgaatctgcggaatactggtctgcagcggcggaagcagcggcggagtcggcggcgacatcctgcgccggctgcgcgtcggccacggggccgtcctcggcggtgacgcccatctgcgcaagcgtctgccgcgcacgctcatcgccgaacgttgccagccaacgcttcaatcccggatagcagcgcgggttcactgccacattggcgccgaattccgggttttcataggcgattttcgccagcaagaccggatcggcattgggatcctgcactgttgcgacggccttgtcataatcaaccatcgtgacctctttccttgatgttcagatttggttggccggtttctggatgcgtatggtgtcaagcgtctcgtcactgaccgtttcgagatcctcctgctgcgcgagcctactggcatgccacaccttctgcccagcatactcgcccgttatgtccagaacaattacggtgacattatccgtaccgcccgcttccagagcgatgcggatcagttcgtcgacggcggtctgcgggtccgcgcatgccgcagcagtggcggcgatggcggcgtcatcgacttcgccgtgcaggccgtccgagcagatgatgaacctgccggtcggtcggaccgcgaagaagtccgggttgatgccgtccgggtcgccgatgcactgggtgatgatgttgcgcgggatgatgacggcatcttccggcagcatctcaccggagtcgatggcctcctgacggcgggagtggtcgcgcgtgatgcgacacagcgtggaggcgtcccactggccgtcgctgtcggcatccatgtgatatgtgcgtgagtcgccgatattgatgacgtaccagtccatgtcggggttgatgtcgagcgccacatcgccgggcgcgtcccgttcgattcgccctggcgcgatcagtccggtcaccgtggtgccggacacgccgccgagctcctggccgatggcgagcacgtcggcctgggcgaggtcgatcgtatgcccgatggtcgtgcggctccggctgaaacgtgacgccagtgtctcgaaacgatccaccgcggcgctgctggcccgttgcccgccgacgccgccgcccatgccgtcacagacgaggaacacgccgtcgtcgatgatgaacgaatcctgattggcgcgtcgcctcaggccgatgttgctgtccgctgccacgtgaatttgcatgtcgttcatgactgtcggcctttctgtgaggagggttgctgtgcggatggttgttgcgtagcgggcttctggccagcgggctgtttcgtggaggatttccgcttgacgggccgctgtttggcgggttgccgcccgtctggcttcctcttgtctccgtgccgccatgtacgaatacttgacagtatacgaacgttatggaaaactccgcgcaatgacaggcgggttcgcagcctgcgcatgaaggactgcgaggcgagcatgagcttgcgggtcgtcagtacggaacgccagtaggcgcctgcctgttcgggcgtgaccggctggccggagaacgccgcgtaatcggcttgtcgtcccagcgcaatcagtggggcaccgtcgatgttgagctgccgtgcgatggcctgcgcctggtcgcggcgcgtgccggtgacgggtatgccgctctgcccggcgagcgcgtgcacggcctgccagccggaggtgatgcgctgccgcgcgtcgccgtgccggcgcaggcgggccagggcgacggtcttgagtgcgaggatcagcagacagatcagcagcggtatccataccgggctgccgtagatggcgactttcgccgcgatgtgtccgatggtgctccagatggatgccgccggctcatcggtggcatcctcgccggccagcgccgatttgccgtgtgcctgctcctcgtcgcgcagcgggtcggtgagcggcacgggaggctgtcggaccagcgtctgcgggttgggtggggtgaggttctggttgtcgtcgggtatcttcgtctctttaggcgtcggatagaacgcgacccagccgtagccttcgagattgatctccacccatgcttcgatgtcgttgccggtgaatttgacgatcgagatgccgttgaccgtttcggtgcggtcgttgctgatgtcgccgtcgtcgttcttgggcaggaagcccatgaccacacgggatggcaggccgagttcgcgggccatcagcgccatggcggaggcatactgctcgctgtcgccgaccatcgcggatccagcgagcagcgcgttgatgcgatagctgccatgtccgggcagtgacggatagtcgccggtcaggccgtgtgagaaccaaccagaatccttgagctgcgcgaccagtgcctgcgcctgcgcgccggccgtgtcctcgccgcccgccaccgacgaggcgaacttgcccaccgagtcaggcacgtccttggtgcccggctggttggtgaccgccgcgttggccttggcgatctccttgtcggtgggtgtgggggcgatgatgccgctttccgtataggtcatgccggtggacagcccggccgggatgatggccgactgcgtgctctcgttgtagtagaagagcgtgtggtcggcggaggatcgggattcgccgccgccgtttccgttggcgcctccggtctttcccgctgacgtgacgtcgacgctgctcgccgctcctgccagcggcagccatttgtcgctcagacccttgtcgatggtgaacgtggcggtgaacttcttgccgtccaccgtattggggatgcgggtgccgacgcgtcggtagtcggatgagtccgaggcttcggtggagtcggacaggttccacacgttgccgtcgaactggtccatcaccgcgagcctgaccggcgtgccctcgggcagattcgtgaccgtgagcagcgtgtcatccttgtggtccttgacgtaggagcgcaggccgctgagcgggcttgcgtaatcgtacgggctgagcggcggatcgtagtagtcgcgcaggatcagacgtgactgcccgatgcccatgcatgcgcccacgcccaggccggccgccagcagcaggatgatcgtggcgctgatccagcgtcccagttccagaagttgccatcgccacgacagccagacgatcatgatgaggccgatgagaacgccggaggctatgggctggaaaccggtctgcgtgcccaacagggcgcagaccaccagttcgatggcgatcggcagcaggctcagcacactgagctgccgtttgtcgccgatggcgaacacgccggcgaggaatgacagccataggcatatcgtccatgccgccatcaggctgccatcgccggaaccggtcggcggcggtacggcgataaggtatttgaacgcgccgaaggtgctgacgaacccctgtgacagtgtttccacagagggaatcacatggctgatggcggtgtcgttcagcgcgatgaccgggccgatgacgccctgcgcaacgatcaggaacacgatctgccaccacaggcgcagcgcgggtgcggtccctgcataggcgatgagggcgccgagcagggtggccggtacagcggcgacggcccacatggcggctgatccgtacacgtcgagaagattggatgcggcaatcagcgacgtcagcgcgatgacggccacgctgatgaggttcgtgccccaggagcggcgtccgacgcgggcgagcggcagacggttgccgccgcgtgtcagccagatcactgaatgggtggattccgcccatgagccggtggtggtgcccgtgccggtcacggtcgagccgagaccggagaacggacgccgggtctgcccgacctggccgggcagggcgtccacggccgacgtggcggagtccgagccgagtgagctgtcgatcacatcgttcatgcgagcacctccatgatgagcggcaggtcgtcaagcgagccgacggtggccagcgtgaagtccgtgaaatgcttgattgcgcgcacgtcgcccggcgaggtctgcagcacgaggcacgtggcggatttcggcagcgcgagcaccatgcgcttgatatggtcgagctgcttgagcgagccgacggtgaagaagtagaacgagctgtcgggcgagtgtcgcagcgtgctctccaccagattcgggttgtcgtcggtccgcggggtgatggcgctgcaatcgtccaggaaccccatcgggaatttcggcgtgtcatgcgcgctgccggcatgcgtctgcagcggacggtcctgtttgaggcactgcacgcccagcgaggcgtgcacgctcacggccatctcgaactcctcttgactgacgtaatcctgcgggttcacgtcgagcgtcatactcgtgtcggtccgccgcgtcgcctcgtactggcggatcatcagcgtgccggtcttcgccgagctgagccagtgcacgttgcgcacgtcgtcgcccggctcgtattcgcgcagcccgtaaaagtcgaggtcgtcgtcgacgatctgaccgctgggctggccttccagatcccgtgcgacgccggcgttgagcgtgttgagccgcgcgatgttcggatggatatagacggtgatgcgttcggccagcgccttctcgtggcgcaccagcccgaacgggtctcccttgcggatgttcaacggtccgacggtgaggacggcgcgggagacggtggtgaactcgatatcggtctgcttggactggcccggcgccagcatggggatgccgaaccgctcgtgagcctcgcccaacggcaggtcgccgcgtgcggtcgtggtgggggtgcgcccgggattgtcgatgtccacggtcacatggacgtcgtcgccgacggtgacgcggcggcgcgacacggcgatggacgccttgaacccggtattgccaagcgagagcgcgatggcgcagaggatcatcatcagcgccatcgcggcgatggcgagcagctcatgccagcgaaccaacgggaatccggccgcgcatacgatgccgatgacgaccacggtccagcccagtggggatatgaacgaggtgaagaatcgcctgaccgcgcgcttgcagcggcgccacaggcgtgccgagctaagccgtcgcctgtgacgcgccgacttgcccgatgcctgttggcctcgttcgttccgtggtttcggcttgcgcggtttccgcggctcctgcggctttgcttcggatgatgaactgtcgttgtgcctgcgcatggaacgcctttcacgcgccgagcgacggcgccggcacggtctccagcatccggctgatggcctcgtccgtcgtcagaccggcgaaggtggcttcggcggtgagcttgatgcggtgcgacagcacggcgaccgccagatccttgacatcgtccggcaccacgtatccgcgcccgtcggaggccgcccagatgcgcgcgcagcgggtcagcgccaacgcgcctcgcatggacgagccgatggtgatgttctcgtcatgacgggtcgcctcgacgatgcgcacgatgtattcgaggatgttgtcgtcgatgtggatgcgctctccgatgccgcgcagcgcgaggatgtcatcgccggcgagcacgggggagacggtctgcgcgcggtcgcggatgttgacctgccgcaggaggtcgacgcttacctgatggccggggtacccgaccgacgtcttgatgaggaaacggtccatctgggcttcgggcagcttgtatgtgccgagctgttcgatcgggttctgcgtggcgatcacgatgaacggctgcggcacgtcgtgcgtgacgccgtccacggtgactttctgttcctccatgacctccagcagtgcggactgggtcttcggcgaggctcggttgatctcgtcggcgagcacgatggacgcgaacaccgggccctcgcggaactcgaactcgccgtgcttctggtcgtagaaggtgatgccgaccacgtcggacggcagcaggtcgggcgtgaactggatgcgcttgaacgacgcgctgatcgagctcgcgatgcctcgtgccagctgagtcttgccggtgcctgggttgtcttcgagcaggacatggccaccgacgagcagggcggtcaggcatagacggatcggatgtgccttgccgaccacgacggtggagacgttcgcgagcagcgcgtcgaacgcctgcttgaagtaggcgatgtcgtcggcgctggccggggtctgcgggttggtgttcgcgacggccgggttcgcggtcactgggcgcgcggctgccgccacgggagtattcgcggttctggctttgggaaaggcgacgttcggaatcttggccgcgggtgcggtggtcgggtgctgtatggagctcagctgcgtcgcatcgagatcgacgccggtcttggtcgggccgttgttcgtggtgttgtcgccggtgtcactgacgggcgagacggcctcgccgttcgtcttgttctgcaccggggactgcgccgacttgttctgtacgctcttggcttgtgacggcttggcttgtgccgactttttgcctcggattgccttgccggcagcagcacctccgcggcgcttcggcaacgtaggaatggccacggtcggtgcccccttcgacttgtcggcctcaccaaccgcggcaccgcccttggcatgcggtgtctcggaaatcacggtgccgtcggacaacaccgtttcatcggagacctcagtcccatcgccgctcgctgatgagacggactgtgctactgtgctcttttccgcgttgccttccgcggtgtcgtttttctcggctgcgttttccccggttttcactgtgctcggtgcggctgcattcgtcgtggcctcggcggactgagccgtgttgccggacgacaggacggtcttgtccgacaacaccgtcctgtcggacagttgcgtggcgtcgtcgagttcgttgctctcgctcatcgtgatactccttgatgtgtgtggtggacggtgttgtcgtatcggttgatggatggttgataaatcatggtcggtttgaggccagtgtgctgatggatggcatggaaccgaacgaccggcgtcggatgcggctcgggtctacgccttccgtgaccgttccggatccctcggccggtttgcgcattccttggacttccctgatgtcgtcggcggtgttcagcgcggagtcggcaccggtcacgctgatgtaccaatacagcttttccgtgtcgatcctgaacgatgagatatcgatgtacccctgcttcgaagctgtgctccatgtgacgttccaatcactttcaccggtcggcttgccgctggtagtggagaacgcgacaaggaccgttgccggctgaccgtagaggttcacgctgccgccggacaccgtgatgcggttacggtctgtcgtgctccacgccagcgtaggcggttcgatcttcgctggggtcttgtatacaaggcccttaccgtcaaatatgatggcttcgctggagtgccccttgaacgactgcgtagctgatacagtgccgcaggtttcccacgggttgatgcggtaagttgcggcggctgaatcgccgttgcctctgtactcctgaccgttggcgaaaatggagagtccgtcatgctcgccattaccgccaactgacacggagcactcgttacctttgagcgtcacctgcaggtttttcggaggctgtatcttgtactgcggcgtcaccttgttcgagtcagccgaagctggtttggcgccgctttgctgcgggttcacggtcgccttgacactgagctcctcataccactgatcgcggctgatcgtatcggtgaaggtgtgggtgccgcagggggccgacatggagattgcgccgctcagttccacgctggaacatcccgcgttgtgcatgttgccgagcgtcaacgtggccttcaatgtattgccctttattaccgataggctgaccgtcggcgcgtccgggtcgccccagggcgtcgccgcgttgctggcggcactgggctggccttcgccggcacggttctttcctttgacggtggcggtgtatgaggtgccatcgccggtggcgctgttgtcgattgggaacactagggaattgccggaggtctccttggtgacggaaccgccgcccgaaccggtcagcgtcaccgtgtagctgtccggcttcgtaccgacataatccggaacatcccacttgaccgtcacacgctggtagccggcctcggtggtgaccttcttcggtggatcgggcaccttgtcgggcatggctttgaccgaggtagacggcttcgaccagccgacctcgttcttcgccttgacggtgaacgagtattccttgccgttggtcagcccggtgatctggcaggtggtgaccgcgccgcacgacttgctgccgccgtcccaatcgacctcgtagtcggtgatcgggctgccgttggccgcgcctgcggtccacgagaggttcaccgaaccgtcagccggctgcccggagacgggggagagcagcggcgcgccgggcttgtccaccacggagacggtgatggtggcggtcacctgtcggtcgcgcgaacgggtgccgtcctgcacggtgacgagcacggtgttcgaggatgcgccgatatcggttccggcggtgatgctgatgttgccgttcgaagagcagttcacggtcagcttcgccgaatcgtcggacttgcagctgacggcggtcagcgacgaatccgggaacggattgtaggcgtcggagaacaggtccacccgttcggtcgaaccggccttgagtttaaccgtcttcgcgccgatacgggcaagcgggcggttcgactgcaccacgcgggcggtcatgccggccttgaccgtgccgcccgaatagatgatggtcacggggatgctggccagcgatcccacggtagcgtccttgggggcgctgacggtcaactggccggaggcgctgacgcgcgcggtgatgccgcccgattcgctgccgccggaatatgtgtactgcttctcatcgtcgtatgtgccggcgggggagtgggtcagcgcggtcaggtcgatgatcttcgcatcctcacctgccaccacgtcgatcgtggacgacgagaaggtcggcggtggcacttcgcggccgatgaccgtgatcggcagggtcagcactgcggagttgatgatctgcgtcttgtcgttgcccttgccgtccgccgcggtgaacgtgatcgaggcgggaccgctgtaatccttcggcgcggtgaatttcagcgtcgtgtcgttcacgtagaggtcgccgccatccgatttggtggcgctgaccgattcgggggactgcacgtaagcggtcttgccggcgcccacacgcacatagtcggcgatgttgatggtgatggtctcgcgcgagttcaccttcagcggcggcgccttcggacgcagcgtcggcgggaacacgccgtatgcgggcacttggatgaacgcggtggaggtgatgccgtacgtcgtgttcgttaccgtgtacggcaccgaacgggcctcgtcggtcagatccacggagatgacggtcgacttctcgccgcccttgaccttcgcgtggtcggtggcggacgggtcgacgccgaccttcagttcgttcgcggtgccggacgggttggcgatccactgcgagacatcgacctcgacggtccgcttgtcgatggtcgcggcggatggtacgcggtagtcataggcggtgggcggctcgatggtcgcattcgggtcgacgttgaccgtcaacgtcgcggtgtcgctcaggccggccttatcggcgaccgtgtgcatgatgtagaacgttcccgcctggtcgggcgtggtgaacgagatcatgttgtccttcacgctcgccccggagataccctgtgactccagtttcttcgaaacggtcagatcggtgttgtccccggaaatgtcgttgagcgtcaccggcaccgtggccgccgtgtgcgggcgcagcgtgatctcgtcgtcccgcgcgtacacgccggagtcggacgcgccctggaacacgcccaccctgacctgtgcctgtgcgcgctggccggtccaatcctccaccgcgtaggagaacgtgtcggtgcccgacgagtcctcgtacgcctcgtagatcatgtagttcgcgccgacctcggtgatgcgtcccagttgcggggccttgttgcccaggccgagcagctggtcgtcgtcgccgtccacgtcgatgccggtcagtgtgatcggtatgcgcactttctgacccgcggccacctgcgcctcgacgtcctgcggagtgggggcggccttgttcttggcgtccttctgatgcacggtgatggtgattgtgccggaggccgagttgccgagattgtccttgacggtgtaggtcaccgggaacacgcccgtctgtttggaagcctgataacgcacggtgtcgccggaaacgaacaccagtcccttgaacgtgtccttgtcgtactgcagcttctgctgcagcgtcaccgtggtgccgtcggaatgcgagacatggtcgagcacgttcaccgacacgatgccgtcggtgcgcacctgcgtgttgacgttcgacgccttgggcgcggagttgccggcggtcagtgccggcggctgcagcactatcgtgccggtggatgagccggccgcgttggcgacggtgtacgtgatctccacgggcttggtcggcacctgccgtgcggtcagatacacgcgcttgtggctcaccaagccggtcttgatgcccagcgacgggtcggcatcgaccgacgtgaccgacagcacgccgcccatcggatccacgtcgttggcgagcggttcgacgatggcggtgttgttcgaaccgagcagcgccacatcgttggccgcgactggcttggcggatttgcccgcggccggctgcacctcaagacgtgcgaggccggtggacgggatggagccttgggtgacggtgtaaggcacgtaatacgtgcccgtggcggtggccttgaatgtgaaggataggtccgccgcgttcatggtcgcgctggttttcgcgggcggttccacggtggacagctgcgcgggctgcgccgatgtgccatgcacgtacggcttgaggttgaccgtggtctcggtgttcggtgtggtctgcttgaccacggcgtcgatggtcgccggcagcgtgtttgccgggcggatggagaagtacacgagtccggtgccggtgttctgcccgtcggagacggtgacctgcacgcccactcgccccgaggtggcggaaccggtgttgaacacgagctgcccgtctgcgcgggtggagacgacgacctggtcgctgttctgcgggaccgccgacaccaatgtcatcggatcgccgtcgggatcctggaaactgccgagtgcgttcgtcgtgtacgtggcaccctgctccacgtcgtattcgggcggcgtgtcggcctgcttgggagcgtgattggcggacgagccggtcagcgtgaccgtcaccttggccgtcgaggtctggccgcgcccgtcgctgatgtcataggtgaacgtcaccgtgccggccgaggccgccgaggcgtccagctgcaggtaccggccgtcgtacaccggcgatacggtcatatcgccgcctgccggggccccgactttggtgatctgcagcacggagcagtctgtctgctcgtcgttgcgcagcacgtcgaggatctgttgtccgcccgcgcgggcgccgatctcgtcgtcctgcgccttgatctgcccggattgcgcggaacaggtcttgttgaagttgcgctggttgttggcggactggtcgttctgcttctgctgggcggtctgctcggtctggatggtgttccactgtatcttgatgaccttggtggagtccgaagggttccacacgttgccgtcgaccacgtcgttgagtacggtcaggcggtggttggtgcggaacaccaaatccgacgtggtgctgaccgattgcagcgagccgaattccgggttgctgacgttcggcgagcatacacgcacgtaattgttcgcgctttgcgcccacgcggccgacacgcagccgtcggtggagaccggtttggctgcgtctccggcaccgccggaggtgagcgtgttgactttcttctctcccttgcccagttcgaccaggtacaggccgttcttgccggcggccgcgacccaggactcctgacggccgtccgtgtcggggtattgcagcgtcaacgggctgttggcgccggtgtcggcgctgcccttgtgccagtacagcctgccctcggatgtgacgaccgcggtgccgtccaccacggtgaaatcgtcggcggatacgggcttcccttcggtgagggagctaccctgcacggccttgcctgtcggatcctgcatcgtgagcacggtaccgtcggagggccggtatccgtacacggtgccgtcatgggtgaccgcgatcttgcctccggtgcccagccgcatggacgggtcgctggtggcggggttgacggagttgaggtcggagctgcggccgacccacacgttgccgtttttcgtgttcaggaaggcgatggtgccgccgccggtcaccgcggtcgtgtctcccttggtctccgtcctgccggtggtacccagcgtggcggaggagatgccggtggccttcgcgccttcggtgagcaccgtgtcgctgtcgtgctggacgatgtcgaaacgggctgcagacgaggccaccgccgaatccggttccttgagcttgacgttgaagcgggccgccttgcggttcttgagcgaggtgacccaaacggtgccgtcgtcgagatgcacgtgttggcgggtgatggagctcacccagatggcgccggcgatgatgccgatcagcatgacgagcgcgatgacgggcatcgcccaacggtgcgcgtcaggcgagaccaggcggcgcatggaggagcggaacgcccgctcgcgttggcgctggttaggctgcttgctcatggcatcctcttctctctcgttcgctcgcttctcgtgcaatgccgtgccgcatggtgcagtccttcatatagtgcgttcctattgcctcaccgcgcatgcgatggccggatcctgggacatctgcttgtcgctgcgcacgatcttcacttcgatgcaggtctgtttgtcggtcacgtcatgcagctcgactttgcggtcggccacgatgttggtgctggtactggggccggaagtggcagaattgccctgtaccggcgaccatgcgtacatgtcgccgtccttgggctgcgggttcgtccaggtgaacgtgacggtggtgccgtcgtaggttccgttcaggttttcgggcgtcggcaccacttcggctcccgtgatgtcgtcgggattgccgtccgttccgttggagtcgccggtggcgcccggcgtggagaccgatgtgcggttgcgcgtcgcggtgtcatccatgtgcggcattacgacgaagacgaacgtcaggacgaccgccgtcagcgcagccacgaccacggtcgtgatggccagcggcttcttccacgcaccggtgggagcgtccattcgcgtcacgttcgcggggccgggcgcgacgcggcgcttgccggtcatgctgctgggatattcggggacgccttccacggtgacgggcgtggcatggccgtagtaggcctgttgcacctgctgcatcgcgcgggcgaattccagcgccgtgccgtaacggttgtccgggttcttgtcgagccccttggcgagtacacgttcgacgtccgcgggcacatcagggcggccgattggcggcaggcggcgactgacgatgacctgcgcgagttcctgctgcgtatgcgcctgataaccgtgctcatacggcgaacggccggtcagtgtggcgtacagggtcgccgccaaggagtagatgtcggcggcttcggtgccgccgctgcgtccggtcagcacttccggcgcggcccatggcacggagaaaccggtctgggttcccgcctgatacacgttcgtggagatgccgaaatcggcgagcaccggcagtccctgcggggtgatgaggatgttcgcgggcttgatgtcgcggtgcaggatgcctttgcagtgcgcggtgaacagggcgctgcaaagtttgatgcccaggtcgagcatctggtcggcggtgagtggtcgcttgcggatcagctccttataggagccgccgggcgcgtattccagcacgatgtagccaagtccggtgctggtcacgccggcgtcgtggatggaaaggatgtaggggtgcgcggaaagctccgccatgtagttcgcctcattgcggaatcgggcggctgcgcgggggtcgagggtggcgctgctgaccttgatggcgacgtcgcggctggggacgcgctgatggtaccggtatacgctggctgtggcgccggtgccgagtggctggatgaaatcatagccggatatccgcggcggtgttggctgtgccggcatttggctatcccccttacgacatctcttcttcttactctattccgaggtgttcccacgcacaacccttgatggggagcgctgaggagtgctcgccgcaggcaggagctgccgtgcgatgacgcagttagtccagaataaaactgatataaaaacggaacatatggttcggttttcgattgttggcatatgatggaggaactgtctgacggacgacggggccggcgacgggaatggaggtgccatgaaggcggttgaagcactgcttgagggggaatccggcaaggcgctgctggtggttggtgctccttgcgtgggcaagagcacgctggcccgtgatgccttgatggccgggctgcgacggttcggcgaatccggagcgatgatgacggtatccgggcgtcagatcgccgatgtgataggcgatcaggtgattcgcgagctgggggcgacctcccaggcgcgaccggtcacgacgctgtcggccatcgcgttccggctgatcaccgtcatgcgttcgaggtcgggcgagccgctgccgaggttgctgaacggcgccgagcaggatgcgctgctgcgttcggtgtgctccgtccatgtggctcatgtgcgggcgggggatccatgcggcacgtgctcgttgctgcgcgaatacttcgccagggatgattgggacggcgtgctggccgatgccgtggccgggaacgacggcgagggtggtgatgcggattccggcgtaggcgtcaatgccgccttcgtcatgcagctgcgcgacatgttggcccgcatggatgagctgggcgtctccgaggatcgtgaaggaacggccctgtcggcgttgaggcattggtcgccgcgcgtcgagcgtttgcatgtgcagtggcgtctcgcgttcgcgttgcgccgcgaatacgagaccgcggtgagtcgtatgtacccgggcgagtatcggttggactcgtcgcgtctgctggtcgagggggccaaggcggtcgggatggtcggcgatgacgatctgccgcgtctgctggtcgtcgacgactgtcaggacctcaccttcgccgggttcacgttcctgaaggcgctgcgcggtgcggggacgcggctgctgctggtcggcaatccggacgaggccgtgcagaccttccgcgggtcatatccggaatacctgttcgaccagattcgtcgtcagcttggcgccggcatggttcgtctgccggctggcggtgccggaaatggccgagttgaggagcgtgcggtggaccacgtcgacggttatacgtatcgcgatctggtcgcatcccgtatctccctgtccatccgatccacgcaggacgagacggttcctctgccgcagaggccgggcaaattgccgcagctgccggcgagtctgccgattgtcgcattgccccaggccgatccgctgccgggcgatggcagtctgaaaaccgcgctgtaccgctcggccgacgaagagacggaagacgtcgtatggcgcatcaagcaagcccacatccttgaaggacgcaactggaacgacatggctgtcatcgcgcacgacaacgccaccgtgcgcacgatcggcgaacggctgcgtcatgacggcgtgcctgtacggtattcatcggtcacacgaccgttgaaggacgagccgttcgtgcagggattgttcgcgctgctcgaattggcgatgctcaggaaccagacggtgcccgcgctgggcatgaatctgcagcagaccgcactgtatgtgcgctctcgggttgccacggtgatgggatgcccgctggtcagcgtcggcggcggacgggatcatgagggatacccggccaggctggagccggtggacgccgccatgaacgcgttggcatcactcggcaagatcgtcacgtgcgaggacatatgcaagggggatgcgtccgacgatgtgcctggcggtgccgccgacgatgcggggaagaccggggacactggaattgctggtgacaccgctcgaatgcatgccttgggcaggctcatgcacggatgggagcaatggcgcgaatgggccgtctccgggcgcgatcggaagaccatcaccgacgacacgatcatcgatgtcaaagcaccgcaaggcgacgaactccagttcggcgtcgatgccatgtacctgttgctggaattcgcggatgacgcgcatgcgatgcatggcggtgtcgccggtctaggcggtacaggtgacgttgtcgacgatgccggttccgctgtcggggcgggcacgaagggcgcgtccggtataaccgccgatgacgtgctcgccgccgttcaggaggtgtgcgggcggggagacccgcattcccgcgtgtttgcccacctgtggaatctggtggggacggtggcccaaggcctgagacaactgccggcgaaggaaccacagtatgcgttgtccgtggcttggaacgcgtgcgacgtcgcctcccgttggcagcgcgaggccctgaacaacacggatgccggacgtgccgccaacgaccgtctggatacggccatgcggctgttcgactatgcatccggctcggccgcaagccgggatctgcccgaattcttcgcgcaggtgagggcgatgcgcatcgaagcggattccctggccaaagtggcccccatcgacgaggccgtgacgctgaccacgccggcgggctcctcggggagacactggccgttggtgtggattccggccatccagcaaggcatatggccgaacctggcagcccgaaacacgatgttcggtggtgaggatctggctgatgtcatgctgtatggagggctgtccgatgattccggagagcatggcgacaacaaactggaatccgtgctgtatgcggagcagaaaagcctgctggtcgcgctgacccgcgcatcggagcaggtcacggcaagtgcggtgtacaacgacgatctgaccccgtctgacttcctgtacggatacatgccggaacgattcaaccgcgaacggcatgcgtcggccgaagggcgggaatatacccaggtcggtgaagccggacggctccaaggtctggacgccgatcctcgcggcctggtcgccgccgcccgcgtggcgctcgccgtatacccacgaggttccaaggaatctcaagatgccgtggatgcgctgcgactgctggcaagcaatggtgtcgaagccgctgacatcacgcgttggccgttcctcgacgaggtcgaggatgcgtcttccggctcccgcacggtgggatcgcgggcggcggctccggaaccggacaaggccgcggagggaaccggccaatcatcggtgccgcggatcgcaacattgtcgccatccgccgtggacagcatctggggatgtcccgtctgttggatgatggaaaaccggttcactggtccgcgcgccggcagtgtggcgacctcgttcggctcgctgatccacgccgtcgccgaaaccgccagcaacgagggcctggacgcggcggactggcgcgatgacctgccgattccggaacgcgtcagcacggtgcgggaccgtatgatcgccatctatgaggagctgcgcgacgatccgacggccaacaccaacccggccgatcaatacaacgcgacgcgcaaggacaataccgcgcatgacgtactgggccacatcgccagctacttcgtcatgtccaacaccgacgaatacccggtaaacaacgtcaagaacttccagatcggtacattggaaagcgcacaatgcgagcgttcgttcattgcggtattcggcttggacgacattcttgccgcctataacgcgatggacggcgtcgacccgatcggccgcgatgaactcgccgccatcatgggatcgctggttggcgggtggcccgaagccatgaacgaccggctgaccgtgcgtctgtccgggcgcatcgaccgtatggagaccagaatcatgcccgacgggaagcgtcacgttcgcctgatcgactacaagaccgggaaggtgccttcgaccaaggccatattcaacgatcttcagctggtctgctaccaactgggactcgcattcccggaaaacgggccgcgcggagccgaagcgctgcaagtcatgccggacatcgcgcaaagtggtctgttccatgtcgcacagaaggatgcgcccgcgacgtccggaaccagcaacgcgcaggagggaatgtaccagccggcgctgttcgccgatggcagtctgaacacgtcatcgttcatgccgcggaaccgctacaagaccctcgataagctttcggatgctcccgatttgattgaagagcctccgaccggtgtaagcgcagcggcatggcgacagttcctcggcatgcgcggcacgcaggccgtatggtcgctctccatgatcgcgagagtgttctacgccgccgcggcgagtcggtcgacccatatacaggcaaggccgaaaccggatcatctccagtattgccgcatgaaagcggcatgcccggcatgcgccggcgaaatcaacaccgtcttcgaaacgaggcagtcatgaacgcaccacgatttaccgacagccccgagcaggcaaaagtcgtcaacgcgcccaccggcgatgacgtgctcgtcgtggccggagcgggcagcggcaagacctatacgatgacccgccgcatcatcaacctcatcgcacagggcgtgccggccgagcgcatcctcggcctcacattcacacgcaaggccgcgtcggaactgctgtcgcgcgtgtccgccgccgtgctggcggacgggggagacgagcgctttgcgaaccgggcgttcctcaagccggaggtgtcgacgtacgatgcgttcttccagaccatcgtgcggcaatacggcctgcttgtcggcttcgaccagaacacgcagccgctcagccaggccggtgccatacagctggcgaccaccgtggtcggccgtcacatggacatcctcttcgagcaggatctcggggcgttcaagaccgtggtgaatggtgtactggggttgtcgcatgccataggcaacgccatgatcggtggcagcacaacaacgatggacgaggccatcggccgtgtgcgggcttgggaccaggcattcctcgcgcaactcgatatcgccattggcgatacgccggttcctgacgaagagccgaaggccaaggctccgacaaaaaacaagaaggacacggaggagaccttcgcggccaaacaggaggaataccgggcgcaacttcgtgacatatgcgtgtacaagtgtgcacagctgcgcgacgtgacccggcgtcgggagacgctgctgacgctcgtcgaggaatacgagcgggaaaagcgggttcagaacatggcggaattcagcgatttcaccattgccgcctaccagctcgtcgcgcgattcccctccatcggggagcggtaccgtcgccgttacacgcatgtgctgcttgacgaataccaggacacctccaccacgcaggcgatgcttctcgccgccctgttccacccccagtctgatgccgatgctgataggtcttcctcccgctggcgggaggcggcgcgcagcgccggaggatggtccaaggatggcgtcggcctgtcgcgatccgcggtgaacgcggtgggcgacccgttccagtcgatttatgcgtggcgtggtgccagtcccggagcgttccgcatgttccaaagggacttcggcatgcccgccgacgcgaaaccatacccgctcagcgtcacgcgacgcaacacctgcattgtgctcagagccgccaacaacctcaccgagccgctgcgcataccgccacggcgggccggcagctccctgatgcgcgaagtggacgtcgcgaacctgtccgcgatggacaacgccgcggaaggtacgatcggcgtgctgggatttgccaccttcggccaggaagccgatgccgtggcacgcttcgccaaacaggccatcgcacggtaccggaaggacgacgccgccacggccgcctccgataccccgcatgtggcggtgctgttccgaggcaagacgcacatggcgcaattcgcccaagaactcgaacgggcgggcctgacgacgttggtcgtcggctactccgcgctgctggagaggccggaggtccaggatctgatcgcattgctgcatgcggccgccgaccacaccgattcagcgtcgttgatgaggctgctggctacgccgcgattcggtttgggatccgaatcgctcacccgcctcgccggcatggccgaagatctcgacagccaatgccgctaccgtgcactggtcgaatccggcatcataggttcaggttccgatggcgctcgtgccgatgatggtcatgatgaggcaacagtccccacgtccattgattccggtctcgtttcggaagcggatggcggctccgacatcgcgacgttcgccgacccgcaggtgaaggccatcgttaagcaataccgggatcgagtgccgcatgcggtgttcctcatcgacatgatgatgcgggatgacctgccgtcgctgctgtcgcgtcgcggcggattcgacgagacgacatcacgccgtatcatacaggcgggcgaagtactgcagcgtgtgcatgccgtgactaatcacccgctgaaggaagtgattgacgccgcggtgcgggccttgaacctcgacatcgacacaatcgtcgcccaggcggtcaaaaacccctcccagccggtgaaccccacgcaggcgcgttcgcctctgcagtcggtcgccgcactggtcgacacctatacgcaggaaatcgtcgaaggcgtgaatccgactttacgtggattcatgtcatgggttgactcgcttggccagatagaggaggataccgcggcggtgcccgacactcctgcggacgtggtgctgatgaccatccatcaggccaagggattggaatgggacgccgtcgccgtggtgtccatgcaatcaggagtgttccccagcaatcagggcggtttgcatgtcgagctggacgcggagcatcccggcggcggtgccggcgaatcgtggactcccccggaatacaaggcgacggttcgttcatgggcggacgacccggccgcggtacctgcgcccgtgcgcgtcgacgccggtatcctgccacgtttcccgcacgacgcgaatccggatgacgccccggtcgaaacactgcgtgccctggacgatgtcgaagtcatcgacgacgagttctacggagacctgcgcagcaaggacatcggagacgatatggatgtcgccgacccgtccagctggtatctcacccaggaagaggaatatggccgacgtctgctggctgacgaacggcgactcgcatatgtggcgctgacacgggccaagaaagacgcgctgctcacctacagccagtattcgattctggatcgagatccgagccagtacctgaaccgtcccggcaaaagaccgagcgcctcgaagccgtcggtattctggacggagatgcaggactcgctatgccatgagagcggtctggtatccgcgtgcaagagcgggagcgcgggatactccgagaatgcggatgccattgccgacagtagccctgacttggcggtggccggtgcggcatcaggtgcgtctgcgcacccgtcgctggaccagctgggtgtggacaggccgcaggggttcttcgtcggcgaccacgccaccgaatatgagcgggatgtcgtcgaagaggcatggaacgccccattggaggaacgcgaacagggcggcggcccgacatggccggccaagttgtccgaggaaaccctgtcgaagctcaccggcgggatgtccggcgattccgggcttgtgaccgacgatccggactccctgctggcacgcgcccgaatgctcgttgaagaccccgatctgatgccatggtccttcggccgaggcgagcgcgagatcgaccgctatgtccgccgtcaggcggagcacctgctggagcacggacggcagaacgtcaccgcgttgcaggcgagagcggggcatatgacccagcgcgaggaacgcggctattggcgtggcctgatccggcccatcccgcgcgtcgcatcccccgccgctgaggcgggcaccctgttccacgcatgggcggaacaattcatcaacgcctacggcgacggccaatcaatagatgcagacggcatcggcgcatacgattccagcagcatcgaaaccggtacggccggcacctgccgcgagccggtgacccgcgaatccctgctgcacgatctgtccgaactggaaatgaaatccgacacactgacggcgaaggaacgacagctcaccgtatggcagcgtcgactcgccgaatcgacgtggtcggagcgtcgcccggcgtgggcggaacgccagatcgtcgtgtcgattccccagctcggtgacgtcatcgtcaacggcaaactcgatgcggtgttccacggcggactggacgcgaacgatccgacgaagcaatacaccatcgtcgactggaagaccgggcgcaagccacgcaagccgcaggacatcgaacacaagctcgtgcagctcgactggtatcggctgctgctgtcgtacatcgagcacgtgccgctggacagaatcgacgccaccctctactatctgagtgagcctgatgaaggcgcgcgcgagctgcacgcccgcgcgaaaaccgaacaagagatcctagccgagttgagctccggcattcccgaaggatccgacaatgactaggtgaccgccaagggggcggcacacgctgcggatggaacgcgccgcagccgtcatgccgggagggatgccgcgacccttggcgcaccgtgtgggcgggcacacgtgccggacgcaacaaccacaaaggagcagaaccatggttgcgcacgacaacaccgtcatgaatgccaccatcaccaatgccacgccatccgccgatgacgagagcaccctcccggagagcacgccgatcgagacagacccacagcgtggcgtcatgtctgacgtcgtgcctgacgtcacgccggaggaggtgccgggcaccacaatcgcatctacgccggcaacggcaacagtgcccgccgaggagatgaaaccatcgcaatcggtgacctaccggcccatgcgttggaatgatctggacgacatcgtccgggagttcgaccgcacatggggtcagtgcagcgcggccgccggcacgccggtgtccatgcagatatcccggcacttcgtgctgcactacctcgaaccgaccacccgcgccatcatcgccgaactcgacggccgcttcatgggcgtcacactgtcgcgcgtcgccggcgagccattggccttcccgcaagccaagcaggaactcgccgcgatcaacggcgaactgaaccggtcgacactcggcgcgaaaaccctgtccgagaccgagcaatggcatgagatggaactgcgcatggaacgcgaaatcgacatcaacgacgtcgcgcgcggcgagatcgagctgttcctcgtcgcgaaaagcgctcgcggacacggcgtcggcggttcgctctggcggcaggcgatggactatttcgcgaattgccaggtcgcccggtactacctgcacaccgactccagttgcgacgtgagcttctacgaccacaaggggctgaactgcatcgccgcccgatacgcggcggaccatcccgaggatggcgcagacatggacgacatcttcatctacgccggaaccccggagaacactcgatgagcggggctcaacagcagagccgatccgccgcatcgcagtcgccgtacgcgcaactgttccgcattcccggcgccaaggcgttctgcatctccggagcggtggcccgattgccgatctcgatgatgtcgctgggcatcgtgctcgcgctcaaccacatgtacgacaactggacggtcgccgggtcgatgagcgccatgtacatcctcgccgtcgccgcggtcacgccgttctacgcgcgcctgttcgaccggttcgggcagcggcgcgtcggaccggtggcgcttggcgtgcagatagtggcgatgcttgcgttcgcactggcggcgctcgcccgagtgcccatcccggtgctgttcgcgctggccatatgcatggggctgacccagttctcgttcggcgccctcgtgcgcacccgctgggcgtatgcgctgcgcggttcgcaacacgagtcgctgctcaacaccgcgtatgcgctggaagcggccatcgatgagatcgtattcatcttcggtccgattctggcggcgttcctcgccacctcggtgcacccggtgtcgcagttgttcgtgcccacgctggcctgcggcatcgggggagcggtgttcttctcgctgaagaacaccgtcccgcccgtgttggagccgattgacgtcgtcgccgccgaaataccggacgcgcagtcgaacgccgtcaccggtcagccggctcccgcactccagacggccggagaccatgccgcaccgacgccctcccccgaagacaacggtttccggctgcgtcgtctgcaccggccctattccgccaagccgcgcaatgtactgacgtaccggggcattctgccgctgctggtcgtgttcgtggtgttcaacatgagcttcaccgcattcgacgtgtccatgacggccacgatgaaggccgccggcgcggagcggttcctcggcctgcagctcgccatgttcgcggtcggctcctgcatcggggcggtcatcttcggttcccgggagatgaaaggctcgcactggcggcatatggtcatgttcctgacgctgctcaccgtcggctatgtggtgttccgcatggtgatgggcaatttcctgatcctcggcgccatggagatcctgaccggcctgtgcgtctccccgctgttcgctaccggcaacctgatcgtcaaggacatcgtgcccgcgcgctcgctcaccgaaggactgtcgtgggtgaccaccgcaggctcggtcggcacctcgttcgggtcgaccatcgccggtgccgtgctggacgcatccagtccgcacatgagcatgatgattccgtggatcgtcaccctgtgcgcggtgccgctcgccctgctcggctggttcctcgcccgaaaacggcgctgacgtccgtcagccatgtacccgccgtggaacgcggcgacgcagaagcgcgtcgccgtcaccctcgcccgcgctcctgcgcggatctccagtatctgcgcgaccctgtcgttcacgtccgccttcgtggcgagccggtgttcgagcaacggctcgccgatggcccgcctgatgaccggtcgggtcttgagcagcccggccgtgtacgggtgcgctggatggtcgaacacgtcatacacgtcgccggtttccagcagacgaccggcatacatgatcgccaccttgtcggcgatctgcgcgaccacgccgaaatcatgggtgatgaacagcacggaaagcccgtattcgtccttcagcgacatcagcaggtcgaggatctgcgcctgtatcgtcacgtcgagccggtggtcggtccgttggcatggttccattcggcacgtagccattgctgcactccgagaactccgccatcctctgtgggaagcgtcagcctgcgacggtgcagggcggagacctcggtgaccacggggaattgtcgaatggtgttgccgttcacgttgcctgcgatatgcgacagccccttgtcccaagtgaccagttgcacgtattcccggccgttcgcctccaacagcggatgcaccgtggcccagccgacctcggtgttccagaaccacagcgaggtcgaaggtttcgctcgtttcgatcattgggccacatgaggcgcatgccagtccacgagcccatctgcactcacggtgtcacctcggaatccgcgcacgtcttgaggacggaggtctttgatgcggatgaccttatctgccattcgacgtttccttcttgacctcgaacgggagtccctgttccctgacgacggccttcaggaagatcgtgaccgcgccggagagggtgagcccgaggtcttcgagcacgcggctggattcctccttgagctgcgggtctatcctcatggtcgtggtgggtatgctcgccatatgcgcctcctatgcttgtcggttgttccgactgtacatcgtatgcacggtgtcatgcggctttccgccaataatccatgtacggtagcgtcatgcgctggcagtcacggcggcggatgcgatacaggcctttgccgagctggcgggcgagcagcccatcatcgtcggtttcgccgaatccgtcggtgaacgcgacgagccattggaaccagtccaggtaggcttgcaggtatttcgttgacacgccgtggaagccgaacatgaaagcctccaatcgcgcatgcagcgtgttcacgcggttgatggcgagatcgcgctcctgtggcgtcagttcgccaagttccttcctgaccctatcggctatacgcgccaccttgcccgttctcatacctaccatcattgtagctacccagtaaccacactgcaaggcaaaaagtcaaccttggtctaacagagccaaaatttatgaagccgtatcagtgcgttgtggaacggtgcgccgaaccggtcggagccgggatgtgacccagcttacggacaggtggccggaccatgggccggcatgcctatatattggtagggaattttggaaaagttacggacggtttcgctcggaaaggtcgtgtgatggtcagggtttcagtggtcggcgccaaagggcgcatgggatctcatgtggtggatgcggtgaacggtgcgcaggacatgcagctcgccttcgcactcgacgcgggcgatgacctgatgcggatcacgccggagaacaccgatgtcgtggtggagttcaccgtgccgtccgtttcgctcgacaatgtgctcgcgcttgtgaagcggggggtcgacgtggtggtcggtaccaccggttggactgatgagagactcgccaaggtcacggcggcgctcgccgaggctccccgtggcgatcaggccgtgttcatcgcgcccaacttcgcgatttccgccgtgctggccgattatttcgccaaggtcgccgcgccgtacttcgagtccgcggaggtcatcgagctgcatcatcccaccaaggtggatgcgccctccggaaccgctatccacaccgcccgcgccatcgcggatgcgcgcaaggcggccggcctcggcgccatgccggacgccaccgagacggatggcggctctcgcgggcaggtcgtcgacggcgtgcacgtgcatgccgtgcgtctgcgcgggctcaacgcgcatgaggaggtattgctcggcaatgcgggcgagcagctgaccatccgcgccgacagcttcgaccgcatcagcttcatgcctggcgtgctgctcgccgtgcgcaaggtcgccgacggcggtcatgccggcctgaccgtcggcctcgacaagttcctcgacctgtaaagcgttggcctggcatcccccatccggcgataatcccgtttggtggggtctggatgggactttggtgggatgaaggaggtccgggacgcgttcatattatgtacgggtgacggcgatgcgtccttgctgccaagtacggtaaagagatatgagtgacggtactatgcatcttctcaacccggctccgttcggacgcatcctccccgcaatggtcacccccatgaaagcagatgggacggttgatttcgaggccgcgcagtctctggcgaagcaattggtcgccgacggcgccgacgggttggtggtgaacggcacgaccggcgaatcccccgtgacccacatggaggagaaggtcgagctggtgagggccgtcaaggaggtcgtggatgtcccggtgatctccggtgccggatcgaacgataccgcgcacaccgtgcgcatggtcgagcagacgcaggaggcgggagccgacgcggtgctcgtggttatgccgtactactcgcgccccagccaggacggcgtggtcggccattacaaggccgtcgattccgtggccgagaggccgatcatcgtatatgacgtgcccggccgtaccggactgaaagtccgcgtcgaaacatatgaccgtcttgccgagcttgagcatgtcaaagccgtcaaggacgcgaccggcgacctcgccgccgccgtcgaaaagcagcagcgcaccggcctcgcctggtattcgggtgatgatggcctgttcctgccgttcctgtcgatcggcgccgtgggtatcatctcggtgatcgcgcacgtcgcctcctcgccgatgcgccagctggtcgaggcgttcgaccgcggcgacatccatcaggcgcagcgcctcgccaaccagctcgccccgctcgtccacgcgctcaacggcgacggctaccaggccgtcatggccaaggcctcgctgagaatcaagggctatctttcctccacggccatgcgcctgccgaacatcggcccggacgccgatcaactggccaaggccgaagagggcatgaaagcagcgggactgctctgaccgggccacaccggcctcgctcgggatgcacccggattacggcatcgtccgactccgggaacggccgtcccggtcgcggatgcgaacggcctcggcggacacgggcgagcggttgcagataacgtcgtttccgtgacacagacggaaacaaagaaacagaaaaccaatagagaatggcacaagaacaacaaaagaagaacaattcccgcaggtcccgttccggtggcgcgtcgcgccgccgcggatccgcgaatcgcaacaccagcaacgccggctcgttcaagggccaggccaccgctccccagcaggacgacgtcctgatcgccccgccgaagtaccgcaagggttcgatgcgcatcacgccgctcggcggtctgggcgaaatcggccgcaacatgaacgtaatcgaatacaacggtcacctgctgctcatcgactgcggcgtgctcttccccgaagaggagcagccgggcgtcgacctgattcttcccgatttcagctacatcaagaaccgtctcgacaaggtcgacgcgctcgtgctcactcatggccatgaggaccatatcggcggcgtgccctacctgctcaagctgcgcccggacatcccgctgatcggctccaagctgaccctcgccttcgttgaggcgaaatgccaggagcacaaccagcatcccaccatggtggaggtcaagggacgcgacaagctcaaggtcggcccgttcaacctcgaattcgtcaccgtcacccactcgatccccgacgcgctcgccgtgtacgtcaagacgcccgccggctccctgattgacaccggcgacatcaagctcgaccagctgccgctcgaccacaagatcaccgatctggtggaattcggcaagatcggcgagcagggcgtggatctgctgatgatggactccaccaacgccgaggtgccaggcttcgtcaagccggagacctccatcggacccgcgctcgaccaggcgttcgcgcaggcgagccgcaagatcatcgtcgccagcttctcctcgcacgtgcaccgcgtccagcaggtcgtcgacgtcgcccacaagtacgggcgcaaggtcgtcttcgtcggccgctcgatggtgcgcaacatgtccatcgccgccgacctcggctacctgcacatccccgaaggcaccgtcatcgacctcaagaaggcgcacgacgtgcaggacgacaagctcgtcttcatgtgcaccggttcgcagggtgagccgatggccgccctcggacgcatcgccgacggcaaccaccgcgacatcaccatcaacgagttcgacacggtgatactcgccagctccctgattccgggcaacgagcatggcgtgtacaaggtcatcaacaagctcgtgcagctcggcgcgcgcgtcgtcaaccgcgacaacgcggccgtgcacgtgtccggtcactgcaacgagggcgagctgctgtacatgtacaacatcgtcaagcccaagtgcgcgatgcccatccacggcgagaaccgccacttggtcgccaacggcctgatcgccgtcaagaccggcgtcgatccgaagaacgtggtgctggcggaggatggcgacgtcgtcgacctgtaccacggtcaggccgcggtcgtcggctccgtgccgtgcggctacgtgtacgtggacggcgattcggtcggcgagatcaccgacgaggagcttgagaagcgccgcatcctcggcaccgaaggcttcgtgtccagcttcgtcgtggtcgataccgaggcctccgaagtcgtcaccggcccgaagatcttcctcaacgcggtcgccgaagacgaaagcgagttcgacaagatccgccatcagatcgtcgagcagctgcaggacgcgatgatgcaggggacgaaggacacgcacagactgcagcagatcatgcgccgcacgctcggcggatggatcgcccgacagctgcaccgcaagccgatgatcgttccggtcgtcgccgacatcgcccaggacatcatcgaagaacccagcaagtaaaccgcttcggctcacgcaagtgacgccggcatacgtccagaagcaagcctgaacgtcaacgtctcagcgaggagtagggaatcgcgtgaacggttccttgttcctttttctgtcgcgacggtcccggcttctttcgggaagacatatcagaaggagttagaaaatatgccaggtgcaaaccttacccgcgtggaagccgaggaacgcaagtccatcgtctccgcccccatcagctaccatgtccagcttgatctgacccgggacgcgcgcacgttcggctcgaccacgacgatctgcttcggcgccgagccgggcagcgagacgttcctcgacctgatcgccgacaacgtgaccgagatcatcctgaacgacgaggcgctcgaccccgcgcaggtgttcgaggacaaccgcatcgcgctcaccggcctgcgccgccgcaacgaggtcaccgtcaaggccgactgcgtgtactccaacaccggcgagggcctgcaccgcagcgtggacccgtccgacggcaacatctacctgtactcccagttcgaggtgccggacgcgcgccgcgtgtacgcggtgttcgaccagcccgacctgaaggccacgttcgacttcaccgtgctcgcgccgaagtcgtggatcgtcacgtcgaacatgccggtcaagtccaaggaggacatcgacgacgtcatcaccgcagacggggtgctcggcgaccacgagcccgaatccgcccgcagctggacgttcgagaccacgcctatcatgagctcgtacctgaccgccatctgcgccggtccgtacgccgaatggcacaccacctacctcaacgaggacggccgcaccgtgcctatggcccagtactgccgccaggcgctcgcccccgcgttcgccaaggacgtcgactacctgttcgacatcactaagaagggcttcgcgttctacgccaagacgtggggcgtgccctacccgtacgccaagttcgaccagatctacgtgcccgagtacaacgcgggcgcgatggagaacatcggcatggtcacgatccgcgaccagtacgtgttcgagtcgaaggtcaccgacgcgctcgccgagcgccgcgtggtgaccgtgctgcacgagctcgcccacatgtggttcggcgactacgtgacgatgaaatggtggaacgacctgtggctcaacgagtccttcgccgagttcacctccacgctcgccaccgctgaggccaccgaatggcatgacgcctgggccacgttctgctccggcgagaagagctgggcgctgaaccaggaccagctgagcaccacgcacccgatcgtcgctccgatcaacgacctcaacgacacgtacgtcaacttcgacggcatcacctacgcgaagggcgcctccgtgctcaagcagctcgtgtactacgtcggccgcgagaagttcttccagggcatcaaccagtacctcaacaagtacgcatactccaacgccacgctcgccgacctgctgcacgagctggagaaggcgtccggccgcgatctcaaggcatggagcgccaagtggctggaggagtccggcatcaacacgatcgccaccaaggtcgaggagaacgcggacggcaccatcgcctcgctcacgctcaaccagaccgcccccgccgagcacccggtgttgcgcccgcatcgcctcgcggtcggcttctacgacgaggatccggccaccggcaagatcgtgcgcaccgaccgcttcgagcttgacgtggacggcgaatccaccgtggtcgccgccgcggccggcaagaagcgtcccgcgttcatcctggtgaacgacgatgatctgacgtacacgaagctgcgtttcgacgccgattcgctctcgttcgccctggcgaacctgcagcgtttcgatgatgcgctcgcccgcgcggtcgtgtggctgtcgctgtgggacatgacccgtgacggcgatctcgccgccgagaagttcatcgacacgacgctggcgctgctcgccaccgagaccgagtccaccacgttccgttacgcgctgagctgcatgagcaccaccgcgtggcactacaccgcgccggatcgccgcgcggacgtggtcaagcacgtcgccaaggagctgtggaagctcgtcatcgccgctcccggcggctccgaccagcagttccagctcgtcacggcgtacctcggctacggcgaggagggcgacgccgagttcgccgagcacgcgcagggcctcttcgacggctcgctgatcgtggccggactggagatcgacaacaacttcacgtggacgatcatcaacgcgctctcctcggtgaagctgatcgaccaggccggcatcgacgcgcagctcgccaagcgcgacaccaccgagaaccgcgagttcgcgctcggcgcccacgcggtgcgtggcgacgccgccgcgaaggaatgggcctggaacgaggcgctcaacaacgccgacctgaccaacatgcagctggaggccgtggcccgcgggttcggcgccacgccgcgccccgacctggccgagccgtacgccgccaagtactacgacgtggtcgactgggtgtggaagaacaagagcttccacatggccgaggcgctgcttgagggcctgtacccgtactacgccgacccggccacgctggtcgaactcggccatcggtggctcgccgaccatgaggatgccgacaacgccctgaagcgcatcgtgcgcggcaatgtggaatcctcccagcgcacgctcaaggtgcgcgacttcaacgccgcgctgtaagacggcgcgaccgacccatacgaaacgcccttcgcgtaacgtgcgcctgcaaggccgccgttcgcgcgaagggcgtttcgcgtgcatgagtatgtaccggcggtgcggcagagtcgtcgtgttgccgtatcgccgtgttgccgtgattcgttgtacaactcccgcatatcagcgaaacgcagatgttgtgcacctacggcgctgtacaactcccgcaaacgggcaaaatatacgtgttgtacagtgacttgagccgcgaaatcgttgatttcaagccattctcttatcgcgcctaaatatctgccgtcgtacaactcctgcataatgcgtaatcgcggacgttgtccagcgtgatgtaccgtgccgtcacatgccgcgcccctgcgactgcgccgttcactgcccgtataccgaaatgttacgggaaaggggtattgctgaaagcttcatgagagtacactttcggattgtagggggttcatcatgaaactcctcggcgatatcatccaaagacggcgtgagccgggaagggcaggttcatggtttctcgttagtcgagggtgaaggccgggtgcgcgttcgcgctggcgtgtgtgttgccttgcgcgtggacgcccggcgcgttcgcggcggatgacgggcgttggccggtggcgaacgatgtggtggctgccgcgtggaagcagggcattgatggttccggtgtgaaggtggcggtgctggattcgcaggcggtggaggattatcccgcgttgaagcatgcctcgatcacatacaagctgggacgattccataacgtggatgacaagacggtcgagtgcaaggtggacggcaagccgttgaccgcgacgatcaagtccggtgaaggcgactactactcctcgcacggcaccgacatgctggcatggatcgtgggtgatggaatcaactacacttcgaagtggcccggaatcatgggggcggcgcccaaagcggacgtgttgcatattacggatggggcggttaatgcggggcctgttgtgacaccttgcgatcagaaactcgcgggtgatgcgacaagcgacagtggtgcagatgtcaagacggcggtggactgggacgctcgcatcctcaaccgttcccagggaggtgatctcgtcagcgcggattatgccgggtatgtggatgccctgcgtcatggggtcgtcatggtcggaggacgtgcgaatgacatgaatcccggcttggatgatctgaccggcgacccgcgcagcatggagaccttccccggtgtggtgatggtgaacagcgtggacgagtccgggaacctggcttccacctcggatgtcatggacggcaatgtggcggtgctgtcctatggcatgaacgtattagacccggtcaatcctctttcgaatgtctacaatatcgcgggcaatggcggcacgtcgaccgcggccgcggtgttgtcgtcgtacctggcgctggccatgcagaagtggcccgacgcgacgggcaaccagatcatccagtctttgatacgcaacacgaagagcggcaagggcaagccggtcattgacccggaacgcaagcgggggttcggcgaggtggacctgaatgcgctgctgacggtcgacccgacccagtacaaggatgtgaacccgattctggagtaccagatgaaggcggccgcccaatacccggatctgaaggactggtacacgcaggattgcaagacgaacccggacggcgttggcaccgcagcggataatgtcccgtgtgaggccgggctcatcgggcgggagtacgagcgtcagcaggcggcgtggaagaaggtggagcagtgccgttccgatggcggctccgactgcatgcaatactccgcgacgaacaccgccgatggttcgaacaataacaccacgacaccgaacgggcaggccaagcccgaaggagacccgtcgcagagcgcttcgtccggcatgccggtgtggctgtggggcgtgatcggcgcaggcgtggccgctatagccgcgggcgtgataatcgccctggtggtgtctcggcggcgtaggacgcgtgcgcggattcccgtatccggtgtggcatatggcagtgttcgatcataccccaacggacccgtgccatcccgcccatatcctggtggatcacaggggagtgggggccaggctccgcctgccccgaaccgggtgccggaacagccacctagccagccgcagcagccatatcctcagcaggtcccccggcaaggattcgctccgccgcaaccatacccgccgactgaaccggcttccggagtcccagcccctgacaaccatggtggcaatggaaactccggcggacatggacggcattcagggtaatgaccacagcagagaaagccccaatcggccccttctctcattggcaaatgactcgcgaatctgcttgtattctctcacatgcctttctccgaaactggcaattgcgcgtgatttgggcagtattcatggatatgggtgcaatcgctccgccggccggttacgatggtgctcggtatgtcgaagagacggcggaagccgtcgaagcaaaggaatcgcagattatgccgagattgtttggaaccgatggcgttcgtggattggcgaacagggatttgaccgcgcgtctggcgcttgatctgggggatgccgccgtgcgcgtgctgggcaacagtgccgtcagggaaggcctgccggagggccgccgtcgtgcgctgatcggccgtgatacgcgcgtgtccggtgattttctggcgtccgcgctgtgcgccggcatgtctgctggcggcttcgacgtgatcgacgcgggcatcatccccacgccgggcgtcgcgttcctgacctccgtgctcaacgtcgagatgggcgcggtgatctccgcgtcgcacaaccccatgcccgacaacggcatcaagttcttcgcgcgcggcggtttcaagctgcccgacagcaaggaggacgacatcgaggccgtgctcggtcaggactgggaccgtccgaccggcgcgggcgtcggccgcgtctcgcatgagacggtgaccgccacgaacctgtacatcgaccatctggtgtcgaccatcgccccgctcaacccggacaagacccagcccaagccgttgcgcggcctgaagatcgtggcggactgcgcgaacggcgccacatcggtggtcgctccggaggcgctgcgccgcgccggcgcggaagtgctggtcatcaacgcctccccggatggatacaacatcaacaagaacgccggttccacgcaccccgagcagctgcaggccatggtcaaggccaccgacgcggtgatgggcgtcgcgttcgacggcgacgccgaccgatgcctcgccgtggatgaggacggcaacatggtcaacggcgatcagatcatgggcatcctggcccgcgccaagaaggaggccggcaagctcgccgacaacacgctcgtcgtcaccgtgatgagcaacctcggactcaagctcgccctcaaggacatgggtatcaagaccgtgcagaccgcggtcggcgaccgctacgtgctggaggagatgctccgcggcggctacacgctcggcggcgagcagtccggccacgtcatcaaccgcgagttcgccaccaccggcgacggcaccctgaccgcgctcaccctgtgcaacgaggtcgtcaagtccggcaagagcctcaagcagctcgccgcggacttcccgcagctgccgcagcagctcgtcaacgtgccgaacgtcgacaagatggccgccaccaccaacgcggcggtgcaggccgccgtcgacaaggagtcgaagctgctcggcgacactggtcgcgtgctgctgcgtccgtccggcaccgaaccgctcgtacgcgtgatggccgaagccgccacgcagcagcaggccgacgaggtgtgcgaccggctcgccaaagtcgtggccgacgagctcgcgctgtagaacgaataacggcaataccgcaataccaaggaatcactcgtatgttcggaaaaaacacgaaagtcgacctcgaactcaaccgtgaggtcgagcagctcctcaaaaccggcggcaaggagcgaatcctgccgattgtgcaggccggcgaaccggtgctgcgccagcagaccgtgcaatactccggccagctgagcaagggtacgctgaacaagctcatcgacacgatgcacacgacgatgctggaagcgccgggagtcggcctggccgccacacagatcggcctggggctcgcgctcgcggtggtcgaggaccacgtgcgcgacgacgaggacgatccgcgcgaaatcgccgaattcccgttccacgtcatcatcaaccccagttatgagccgatcggcgacgcgacccgcagcttctacgaaggctgcctgagcttcgacggatatcaggccgtgcgtaggcgctggctcgacatcaccgcacgctggaccgacgagaacggcaagcagcatgaggagcgtctgcacggttggccggcgcgcattttccagcatgagaccgaccatctgagcggcgaactgtacatcgacaaggccgagattcgcagtctgaccacctacgagaaccttgaggatttctggtgcgacgaccccgtgccgaccgacgccgccgaggaactcggcttcgagctgtaggccggggctgggccgactctggtcgcggctggttacggctaactgctgtacaacttccgcattatcgatatttgcgcgtgttgtcccgcgaaatcaggacgccacacgcgcaaaacgctattatttcgcagaataattgcggaaaaacgttgcagttaagccgtttttgctgaatcgtgtcggtgtgggtcatcgctgccggctggacaactgccgcaaaagtcgataatgcgggagttgtccagccggcgaacgcgaagacccccccacgagccgattgcacacgaaccgtatacgtgctttaggctcggcgatccatcgcggcggacgagcgcgtcacaataccgccgcgagatcggcgcgggcgtcggggaacgtgcggcagtagcgttctgcctcggcactcagccgctcgttgacgagcagccgctcgtaaatcggattgcgggcgtagcgtccggatccgtcatcgtacgccgtgacgatgctccgcacctgcccggcccaatcccggccgctgatcgcgcgcagctgggcgatggtgtgcaggtcggaggggtcgtacgcctcgacgatgcgctcgcggtacatcgccctgagctcgtcccaacgtcccagcgcctcgaatgcggcctcgcgcagggattcccactcatacgcaaccagatcctccgggaacatcaccgtgtactggttcggccggtcgcgctccaccatgtcgatgaagccgatgagctcatcccagcgctccgccgcgataaggcgcgccgcgtaggcatccgccatggcttccgattcgtggtggctcaccaagaagcggtcggcgtcggccgcatcaccgctcacgcgcatcagatcatggcgcaggaacatgatcgattcctcgaactgctggtgcgccgacagcgccaccgtgcgcttgatgagttccgaagcgtcggccgtcgagccggtcgcggcctcggcggcgatggcgccatcgtcgtgtgccgtttcgccgtcgcatcgcccgtcctcgtcgattttcgcctccttggcgaaacgatccatcgtgtcaagggcgctgttcagcgcatcataggcgaacatgcgcgtatcgtcccattgcgcgaacgacaggccgcacgacagcagctccaccatctgcgtcgcgttcagctggaaatcctcgttgcaggccacccgcgtgatcagtcgcagcgccttctccccgtcctgcgggtcggcgttgcgcgccacggaatccatgtacacgcgcacgttctggatgagctccttgagatagtcgaagccctcgccgtcccggtccgccgcgttgcccacgaatcgcgcggtcatctcgaccgacttcgccagattcgtggtggcatcgacccagcgcgtgctcatcagcgcgttgccgaccacggcatccactcccgacaacgcctgcgaatcgatgcggaacgtgggcatgtcgttgcgcggcatggacacgccgtcctcggtgcgttcggcggtcggcacggtggatgagatggagtcgaagtaccattgcatcgtcaacccgatcacgtcggcgacctcgttgggggcggcgacgggcacattgttgcggttgtcgtcgtcctgggcggacgcgtcggagatcatatggttccacaggaacgtagggccgtcgaaatccgttgatgccagccagctgtcattgacgaaatccacgacgtcgtcgagctgttgccgcggatccacgctgatcgaggtggttgagccatccatgattctgcctccctggttccgctccgtggttgcaagcgtacgtgtagtctatcgcgattgacgctccgacgttggcaatggcggataatggagaccgtgagcgaacaaagcgtaaaccatgacgagcgacggcaggcggcgaaaggcgccggcgatgagatgacggctgcggacaaggccgagggaaaagccacgaggaagaccggtggatccggcaaatcgggcgcgacggccaagcccggcgaacggtatgagcggggcacgcgcagctacacgatgtcgcatatccgcgggaaggacacccgcatcgaagtactcgtgcgccggtacctgttctcgcgggggcttcggttccgcaaaaacgacaggcgctatcccggccatcccgacgtggttctgcccaaatggcatacgatcgtgttcgtcaacggatgcttctggcatgcgcatcagggatgttccaagtattccattcccaaatccaacgtggaattctggaccgcgaaactgacccgcaaccatgaccgcgacatcgcgcagcacgccgcgctcgaatccgccggatggcatgtcatcgtcgtctgggagtgcgagctcgccaagcccgtgcgcgaggcgcgtctggaacggctctacaccgagatcaccgcgtcttgttccatggcgtccaatgagcttgctggcctcgccaatgcggccggtcccgtcaatgcaggcggttccatcgtataattccccgattaccggctccacatccggccatagtcccgtgaacgcccggtgaaacgggactttgccgggagggtggtaggcaattacaatcggtggcagtaccgaatggacggcaaagggtgatgcatgatgagcgagacgaaacagccgacgatgtcacgacgcgcacgcgaggcgcagccgttccgggcaatggtgttcggcgagagggccgacgagatgatcgcccgcagcatcagcgtcatcaagctgagtctgggggagccggatttcggagcgccgcccgccgtgcgcgacgcgatgcgagagcaatatgatggccgcgcgctgccgtacaccgctgcgctgggcctgcccgagctgcgacgcgccatcgccgacttctaccatgaacgccatcatgtcgacatcgacccccgacgcatcgtcatcaccgcaggcgggtctgccgcactgttgctggccaccgcgctcaccgtcgaccccggcgacgaggtgatcgtcgccgacccgtcctacccgtgcaaccgcgaactgatccgctccttcgaaggcgtggtggtggacgtgccgaccagcgcggccacccgcttccatctcaacgccgaactggtcgaccgcgcgtggagcgagcgcaccaaggcggtgatggtcacgtcgccgtccaaccccaccggcacgaccatcgacttcgacgtgcttaaaggcgtgtgcgatctggcgcgattccgcggcgcgtggcgcatcatcgacgagacatacctcgacctcgccgaccgggagcccgacggcagcgaggtcaggtccgcgctgctcgccgacccggacgcgatcatctgcaacagcttctccaagttcttcggcatgaccggctggcgtctcggctgggcggtggtgcccgaatacacgatcgaggcggtcgacgatctggcgaccaactattatctatgcgcgcacacgcccacccagcatgctgcgctcgcctgcttcacgcccgaatcgttggcggtgtgcgaggaacgcagacaggagctgctcgcccgccgccgcatcgtcgtaagtggtctggagcgcatcggcctgccgctcgaagtggttccgaacggcgcgttctacgcgtatttcagcgtcgcgggaaccggtttggacgcgtggacgttctgcgagcgtgcgctggaagaggcgcatgtggcgctgactccgggacgggatttcggcccggcgaccgcggacacgcatgtgcggctgtcctacgcggcgtcgcgcgaggcgttgacggaggggctgtcccggctcggaaagttcgtcgcctcgctgcgatgattctccgataaccgcggccggccttgggtggaacaccgcgctcatgctgcggccgcgccggtgatacagtgagatgctatggtgaatttgcgttcgcgcgtcactcgattgggcgtgcttgacatcggctccaacacgattcatatgctgatcgtcgacgctgcgcccggcgcgcgacccgatcccgaggccagcaccaaatccacggtgcggctgatgcagtatgtcaaggatgacgggtcgatcaagaagtccggcatcgaggcgattctgaccgccgtggatcagtgcatggaacttgccgaggaatacgacatcacgcaattgctcgcgatggccacgtcggccatcaaggaggctcccaacagcaacaagatcctgcgcaagattgaagagcgcatcggccagagcgtgaccgtgctgtcgggaacggacgaggcccgcctgacgttcctcgccgcccgacgctggtatgggtgggatgccgggcgcctgctgatgctcgatatcggcggcagctccctggaggtcgccatgggctccgacgaggagccgaccgtggcactcagcgccgccgcgggcgcctgccgcatcacacgcgagtatctgcccgaaggcacggcgagcgttgacgagctggaggtcgtgcgcaagaaagtgcgcaggatcctggagccgatggtcgacgcgttccccaaatccaagcatccggcgcatgccgtgggcacgtcaaagacgttccgctcattggcgcgtctggcgggcgcggtgctgcgccagtccgggcgcgaggacacgtggatcatgacgcgcgagcagctggaggactggattccccggcttgcggccatcgagccggagcagcgcgtggcgttgccgggcatcacgccggagcgcacgatgcagatcgtcggcggcggcatcgtggccgacgagatcatgaggtccctgaacgtgcatgaggtcgagatctgcccgtgggcgttacgcgagggcgcgattctgcgctggctcgatcagttcggccgcacgcggctgggtttctgaccgttgcggtttctgcgcgcagcgtctagctgccgcgccggtgacggggcagctactgctccaattgtgccagctgcgtgcgaatcttatgcagtttggcgtaaatctcgttgcgctgggcggggttcttggcacgctgatgatcacgcgacagcttctcttcggcggctttcagcgtgacgatctggtcccggcgggcgattcgcgcgtccagattggctccgtccgcggaatcgagaatcgcctgcgcgcacagcgaatcccacaggtcgtccatcgtcttcgcgccgccgtcggcgttcccttccggtagttccagcgtgacctcgccggccggcctccattcgccggagaacactttcgtgatcggcacatgaccggcccggaccggcacgttgcggcgcacggccagcgcacactcctcgcgtaccgcgccttcgaactcgccttcgtgcacgcagacgaacacgatgccggatttacgctgtccggcgatcagatcgatcacctcgacggggatgccgggcgtgttcacgcgcaggccaatcaccagcacctcgggcatcttgccgctaccggcgcccatcgccgtgttcgcgggccgcagcagcgcgagcatcgtgatcgaggcgatgtcgttgaccagtcgctgcttgagtttggacgataccggcgccttcgccacgaacaatcccttcggcagcgtgcccttctgctcgggaatcgccgccgaggccggcagtcccagcgtcagggcggatacctcgccgcagtgtgcgacggtcaggtgtgcagcagtcatcatcggcctccttgtgttcgcctccggcggcaggcccgcctgtgcgcattgctccaatcctaaccccatccgggcgcccgccggggatgatcgtcacaaaacggccggccgtgtgctccctgcgcgaaataccgttcctccgttacgctatgctgtgcatacatcgacgagtcgggcgacgtcgcggacgggtgccgctgacaggggagaaggacatggctttcacggatgaccagctggagagatattcgcggcatctgattctgaaggagatcggcgtacgcggacagaagaagctgctcgccgcgcgagtgctggtcatcggcgcgggcggtctgggatcgccggccgcgatgtatctggcggccgccggcgtcggcacgatcggcatcgtcgatgatgatgtggtggacctgtcgaacctgcaacgtcagatcattcacggcaccggcaacgtcggcatgccgaaggtcgaatcggcggccgaaaccgtcacctccatcaacccagacgtgacggtgaagccgtatcacatacgcgtatctgccggcaatatcgccgagctgattgccggctacgatgtcatcgtcgacgccgcggacaatttctcgacgaaattcctcatcaacgacgcctgcgttcttgccgggaagccgtatatatatggtggcgcgctgcggttcgagggccagctcatgacgtatgtgcccgggcgaggcccctgctaccgctgcatttttcgcgatatgcccgcggccggcgaggtgcccagctgcaaggaggccggcgtgctcggcgcagtggtcggagtgatcggcagcatgcaagcggtggaggcggtgaagctgatactcggcgtcggcaagccgctgaccgcccggctgatgacgttcgacgcgctggcgatgacgtgccgcgccgtgccgttgccggagcgcgaacccgattgcccggtgtgcggcgagcatccgaccataaccacgctggatccggcgcgatacatccagccggcgtgcggcgtgtgaatgacggcgattccgccgtttaataacgcgccatcaccggcgtctatcaccacgctgcaacgggagacagacatctggcataggctcatgaacggataccgtgcgcctcggcggccaaaggcgcaaggcgcgcacaggcgctggcatgagccacgaacatatgaggggagcatctgacatgacggacaagcgcatcgattcaccgctggcggacgacgacggcgatgccatcaagcgcatcacgccggcacgattcgctgagctcgacaaatccacggtgacgctgctggacctgcgcgagcccgacgaggtgttggtccatggccttgatggcgcgatcaatatcccgttcaaccagatcggcacgaggctgagccgggtgccgaacgacaagccggtcgtcgtgttctgccgggtgggggattggagcgagcaggtcaccgagatccttgccgatcgcggctatgacgccatcaaccttgacggcggattccaggcgtatcgggagtatctcgcctctctgccgcaacagcgggagaacgacgtcgacgatggtgatgcccggcccgaaaagcagacgaagggaagcgccgcgacgctctccatcccggccgcggcgcagcagatatccctgcgcggccctgagcatgaaagcaagtcgacgggggctgccgactcggccgcctcgcacggcagcaatggagatacggacggcgcgcagcctcacgcggtattcgtcgacgccaaagggctcaagtgccccggtccgatcgtgaaggtcgccgacacgctgcgcccgctgccgatcggaacccgactgaccgccgaggcgaccgaagacgccttcctgtcagacatcgcggtgtggtgcgaacgcaccggcaaccgtctcgtctcgctcgaacgcgacgaaaacggcgtgattcatgtcgtcatcgacaagaccgcgcacatgccggcccccggcgctccggccgccgcatgcccgtcgtcgccggccggtcgggcggtatcggccgagactcccgccgccgcaccgcagcagaccggcttcaacccggatggcggcgacgtccgccatgacaagaccttcgtcgtgttcagcggtgacctcgacaagaccatcgccgtgttcatcatggcgaacggcgccgccgcgatgggccgcaaggtcacgatcttcttcacgttctgggggctcaacattctgcgcaagcccaagcgcgtgcgtgtcaggaagacgctcatcgagcgcatgttcggcatgatgatgccgcgcggcacgcgcaagctcggcctctcgcgcatgaacatgggcggcatcggcgcgaagatgatccgctggatcatgaaatccaagaacgtggaatcactcgaatcgctgatgaagcaggcgaccgatcacggcgtgcgactggtcgcatgccagatgtcgatggacatcatgggcatccatcaggaggagctcatcgacggggtggagctcggcggtgtctcaacgttcctcggctccggcgagaccagcgacatgagcctgttcgtctgacgggacgcggcgagtccggttgacagtcgccataggtgtgcggcgtagaatacggaaggcgaaggagacccgcatgacacgcaaactcattctcgatttggataccggcatcgacgacacactggcaatcgcgtatgcgctcgcaagcgaacaggccgatgacgtccggctgatcggcatcaccggcacctatggcaacgtcaccgtcgagaccggcatgcgcaacgcgctcgccgtcaccgacctgcttgggcatcccgaagtgtcggtgtatcccggtctcgaccgcccgtcgaccgcaccggaaaacttccgctattcgccgtcggcaggaacgcggcgcatccacggcgacaacggcatcggcgacatgacgatccccgattcgcggcgctcgccggaaacgacggccgcggcggatttcatcatcgacgcggcgcacacgtacggcaaggacttggtcatcgtgcccaccggcgcgatgaccacgatcgccgaagtctgccgtcgtgagccgcgcatcggcgagctcgtcggttccatcacgttcatgggcggtgcgctgaccgtgccgggcaatgtgacacccggcgctgaagcgaacatcatgcaggacccggaggccgccgacgccatcctgcgcagcggcgtggaaaccacgatgatcggccttgacgtcacgcatcaggcggtgctcacgcggcgcgacatcgagcgatggcggcggctgggtaccgcggcgggtgatttcctggcgggcatgacggatttctacatcgacgcgtattcggcgacgcagcccgagctggaggggtgcggcatgcacgatccgcttgccgtggccgcggcgctcgacccgacgctggtcaccacgctgggcatgaacctgcaggtcgacttggagggcgcgtatcgcggcaggaccatcggcgaccgcgctcacgaccggctcaccgactcgcacaagaccacgcaggtggccgtgcgcgtcgacatcgcgcgattcaagagccagttccttgaccggatcacggcgctggcctcccactgatcaccgcgagacgggcggctgctgatcgccgcgcggcgcttgaccattccccaccctcttcccgcgaaagtcccatgtacattggtcgtgatgggactttcgcgggatggcggcggagccgagccgggcggattctagtggtggttgcaacaccaaaaacaccaggtgttgcaaccaccactagaatccgccctcctcatgccgccttggcccgtcctgtcggcggcggtgctggaggtgacgcgcacggggatgtcatgcatgatgccggtcggtcactgttctgcacgcatgctatcgggcgtcactggaaggcctgtgacgacgatgtcgaaaaatggcgctctcaaaactcgcagagtgacggcacccttcaaaaccattggaaaataagggatttcaacaaccgccactgtgcgcgtgcacacgcagagtgacggtaccctcgcacagtgacggtatattcccgaaatgtctcgtatggtatggatgcgcggggattgggatccgggcgatagactcgatagttattcaaggatgaccgaatcgttctgctcgggtcttccagtcgaatgggtgccccggatgcgattcgaacgcacgacacccgctttaggagagcggtgctctatcccctgagctaccggggcaacgaatgaccattatacatgtcgggcggatatgcgcgtatcgtgcgcagtgtgaagcccgcaggccgccgcgcatacgtgccggaatggggaatgattctcgggaacgatggcgtccgcggttccggggcgttatcgtatgagcttgtatgcgcgacggctggaagaatacatgtcgttgcgtaccggttgacggacgacaggggagtggcgaatggcaaacgcgcgaggaccatcacggaacgtctacggctcggcggctcggcggtccggcgcgtcgtccggcactgcgaaaaggcccgccgcgaaaacaagcgccccacgcggccgacgccaccgtctccttggcgtcttgtcggtcatattcgccgctctcgcattggcgtgcagcgtcctgcgcatgctccccgagaacctgcaggcgctgccgtacatccccgtgatcgtatccgcgacgccgtggttcgtgattctcgccgtgctcgcgctgatactgtcgatcatctcgcgccgctggatcgccatgctgatggcgctcgcctgcatcggcctccaggtgtggtggcagtggccgttcttcagcgcgtccacgaagctgccggcggccgtcgacgcggccatggcatcgacccgggcggacaccggcgacatgatcgcccgcgtgatgaccttcaacgtctacaaaggccatgcggacgcgaaggccatcgtcgacatcgtgcgggatcagcgcgtcgaagtgctcgcgttgcaggagacgacgaacgatttcgtcaagaagctcgacgaggcgggcatccacagctatctgccgtattcgcaggtttcgtcgtcggacggtgtctgcggcaacggcatctggtccgcgaccgagctcgggcgtccggtcgatgacgaggtcgggtcgagcgcgtcgttcatgccgggcggcaccgtgacgttcggcggcggcaaggcccagctgcgattcgtctccgtgcataccaccgcgccgattcccggctactggagccggtggaagcgctcgttggacgagctggcatccatgcgctcgcacgaaggttcgcgctacgtgttcatgggcgatttcaacgccacgaccgaccacacgccgttccgcaacatcctggggaaccggttctcggacgccgcgcggcagtcggggcacgggttcacgttcacctggccgtccaacaagctgccgctgccgcggttcgccggcatcgaccatatcgtgctggacaaggacatcatcgccggtcagatgcaggtcaagtcggtcgccggctcggatcatgccgcgctgctcgccaccatcgtcgtgcagtgacggcggtgacggccggctgatcggggtggtaccttacggcgacgttgtcatgttgtggtaggcgtcggccgatgacggatgccgcgtagtgcgactacggtgcgtggcactacggcggtgcgtcaccacgcatatgggggcatagatggtctcggcacgccatcgttgcgtccataagtgctcgcccaagcgacggctgcgcgcacatatgggcgcaaacctcgtgttttccgtccataagttcgcgcggacttcgccgtggcgcgcgcttatggacgcaacgtcccgtgtagggtgccccgtcagtccaggttggactgggtgccggcggtgtcggcgctgttggcctgctcggcctgggcggcgtcgagcttggccttgacctcgttcagcaggctctgcgcacgcttggcaagcgcttcgccgatctcccactggcgcatggactggtcgaggttcaatccgccggcctccagcgcctgcacggcctggatgagcttgtcgcgggcctcctcgtacggcatctgcgcgatggcctcgcgctccttgtcggtcaggctggtcgccggctcgctcgccgccgatgcgttcttgctggtcatgatggtctccttctgtcgtgtatgcgtgtcgtattcgattggataacggtcatatatatatggttatgcggctgatatctgccccgcactctgctgccgtgcggcactccgctactgggcggtggcggtgatgacccccttgcgcagcgtcagcgtgagatggtctcccgcgctcacctttccggcgtcgtcgatgacgtgcccgtcggcgttctggacgacggcgtatccgcggtcgagcgtggattgcgggctgagcgcggtcaggctggcatgcagcttctccacggtcaggctggcgtcgtccacgatgcgcgtcaggccgatgtccatgcggcggcgcgcgtcgtcgacgaaccgttggtacggctccagcatggtcagcggctgcgtcaggctgggccggttcgcgtacccttcgaccagccgtatctcgttgccgacgcgcgcgtcgatgcgcatgcgcatgcggtcgatggcattgccgatcagctgccactgctcgtgcacgtcgggcacgaccttcttcgccgcgtcggtcggcgtcgaggcccgcaggtccgccgccaggtcgatcagcgtccagtcgtcctcatgcccgatggcggagacgatcggcgtctcgcatcccgccgtggcgcgcaccaccgcctcgtccgagaatccgatgaggtcctcgaacgagccgccgcctcgcgccacgatgatcacgtcgacgtccgggtcggcgtctagccggtgaatcgcctcgacgatggattgcgggcactgcggcccttgtacgaaggcatggacgatgttgaaccgcaccgtcggccagcgcagccgcacgttggtgatgacatcgccttcggcccgtgcgtgcggggcgcatatcagtccgatgcaggaggggaattccggcagcggcagcttgcggtccgcgtcgaacaggccctcgcccttgagcttcatgcgcaactggtcgatctgctccttcagtccgccgccggagccgatcttgcggatgtcgtcgccgatgaagctcaaccgcgtctgcttgacccagatgtcggccttgccatgcacgaccacgcggtcgccctgcttgaatgaggcggccttcgaggcgaacgcccgccagccggacacggatatggcgatgtcctccacgtcatcgcgcaccgtaagatacgccgagccggcgcggcgcgtgttgatctccgtgatctgcccggcgatccacgcggcgggccagcgctccaccgcggtatggaatttctggctcagtacgctgaccggccaggggttgtccgcggtggtctcggctgccaggcgcggcagttggtcgaagggcttggggatgcgctccccgccgccctccgacggccgctgcgtcgcgattgcaaggtcctgttcctgattcatgccttcaaggtttacgtacagaaaggacaagtttttctgcctgcgagagcgtcgccgtcggacggtatcattgttggccggcttttcggtgatggtctcgccgcgacacgctgacgacataccgtgaagtaaatcacacggatgttcttttcggctctattccgccgaaatgtgcatatctaggattgttttcggcatttccccactatatctaggggtggcatgtcgtatagtcatcagagaacaaacaacttacacacgtgtgatttcggatcggcgaccgccgcaagacatgccgggaatcacgaaaggacagggattaggacatggatgctctgctgatgaacgccagtaccgccacctcctccaaggtgctggtggagaagcgtgacggtcgcgtcgtcgacttcgacccgataaacatcatcagcgccgtgaagtccgccttcgccgaccttgacaagcaggtcggcccggaggaggagaagctgatccgcggcttcgccgaccagatcgaaggcgagatcacggagcgctacaacggtcccgccaagatcgaggacatccagaacctcgtcgagcacgccctgatcgacgcccacctgtacgacgtggcccgcgcctacaccaactaccgtctcgacaaggacatccagcgcgccaaggccacggacgtcaacgaggccgtctcccgcttcatcaaccaggatccgacgctgatccacgagaacgcgaacaaggatgccaacgtctacgccactcagcgcgacctgctcgccggcgccgtctccaaggccgccgcgttcaacatgttgcccccggccgtcgcgaacgcgcacatgaagggcgacatccacttccacgacgccgactactcgccgttcaccgcgcagtccaactgctcgctgcccaacttctgggacatgctcgccaacggcttcacgctcggcaacgcgccgatggcctccccgaagtccatcgccatcgccgccacgcagatcacccagatcatgaaggacgtggcctccagccagtacggcggccagaccgccaaccgcgccgacgagcacctcgccgcctacgcgaagaaggactacgagaagttcctcgaagaggcccgcgagaccatccccgacggcatgccggtggagttcgcccgtcgtcaggtcgagaacgccaaggccaacgagcccgccaagctgcacttcggctcccgcgagccgctgcccatggacacgccgttccacaccgacgtcgacgagctggagcaggagcgtgagatcctcgccaaggtccgcacgcgcaagtccatctacgacgccatgcaaacgatggagtaccagatcaactccaaccgcgtctccaacggccagaccccgttcgtcaccgtcggcttcggcctgggcaccgactggttcgcccgcgaggtgcagcgcgcgatcctgctcaaccgcatccgcggcctcggcaaggaccaccacaccgcaatcttcccgaagctcgtgttcaccgtgcgccacggcgtgaacgccgaccccggcgacccgaactacgacctgaagcagctcgccctggaatgcgccaccaagcgcatgtacccggacgtcgtgttctacgagaacatcgtcaagatcaccggctccttcaaggcgccgatgggctgccgctccttcctgcagggctggatcaaccccgagaccggcaaggacgaggaggatggccgcatgaacctcggcgtcgtttccgtgaacgtgccgcgcatcgccatcgaatcccacggcagcaaggagcgcttctggaagctgttcaacgagcgcatggaggtcgcccaccaggcgctgcagttccgcatcatgcgctgcaagcaggccaccccggtcaacgcgcccaccctgttccgcttcggcgccttcggtcgcctcggcgcgagcggcaacgtcgacacgctgttcaagaacgagcgcgccaccgtgtcgctcggctacatcggcctggccgaggccaccgccgtcttctacggcaaggactggatccgcgaccacggctgggacccgcagggcaaggagttcgcgctgtcgatcgtcaagcgcatgagcgaactgtgcaagcagtggagcaaggccgaaggctaccattactccgtgtactccacaccggccgaatccctcaccgaccgcttcaaccgcatggaccgcgagaagttcggccgcatcgagggcgtcaccgaccacgacttctacaccaactccttccactacccggtgtggctgcagcccaccccgatggagaagctcaactacgagaaggacttcccgtacttcgcgtccggcggcttcatcaactactgcgagtacccgtgcctgcaggacaacccgaaggcgctggaggccgtgtgggattacgcctacaacatcggcatcggctacctcggcaccaacacgccgatcgaccactgcttcgtgtgcggctttcagggcgacttcgagccgaccgacgagggcttcaagtgccctgaatgcggcaactgcgaccctgacaagtgcaacgtcaccaagcgcacctgcggctacctcggcaacccggtgcagcgcccgatggtgcatggccgtcacgaggagatctcccaccgcgtcaagcacatgagcggcgagaccggtcacgtgacgctggcggacggctccgagcgcgagtggttcgaagaggccaagtaactgccggtaccgcgcgttgtgctgtccgcgagggtcgccggtatatgttgtctgacacactcaaggccgttcggccaagcttacggtcagacaacatataccggcgaccctcgcccgttgcgcgcaacgttacggttggacagggaggatgatgatggacaggaagtcgacgctgcatgatttcgcggccggcgagaccggccgcggacccggagtgccgtcatcactgaccaacaacccccgttccggccagtgggacgggcggcgcatgtccaagcgcatgatcgccgactacaagaccttcatcgtcaccgacggcgaaggcgtacgcaattcgctgtacgtctccggctgcccgttccactgcgtcgaatgcttcaactcgtcgatctgggatttccaggccggccacgaatacacgcagaagctcgaagacaagatcgtcgacgacctcaaggcgccgtggatccagggcatcacgttcctcggcggcgaacccatgctgaatacgcccgtcctgttgccgctcgcccggcgcatccgcggcgagttcggccacgacaaagacatctggtgctggaccggctacacgtgggaggagctgatgcgtcccggtgagacgccggacaagctcgaactgttgcagctcatcgacatcctcgtcgacggccgctacctcaaggaccagcacgactccctcctgcagttccgcggatccagaaaccagcgcatcctcgacgtgccgcgttcgctggccgccggcaggcctgtcgtctgggccaagctccacgaccaggagcgcgacatccccgaaatgtacctcaaggatcgcgaggccggcgagggcgcgcaggcgtcgtgacggcgccgccggccttgccatccatccagtggattcgatgccgtcggcctgatcgcggccatcctgacggtctcgcccgccatcggcatggccttgcttctccccgcattcatctggcctcgcgtgagtccgctgttccatgtgatgatgctctgtttccgggaagggtgatcgcgcatactgggcaccggattggggcggacgactctgtatatgcgcggcgtgcgggacggcgtggtcgacgttttcgcgggcagcggcgtgcccggtccgctggagggctcggatactgcggccggggtatggcccgccgtcgtcaccatcatggccgccatatcagggatttgagcgggactgggggcaatagcactagtccataagaccaccagcctgctggcatgctcggctcaccccccgaatgcgcgataatgggggtaacgccgcaatcgtggggaaaccgtcgagtttccgttttgcgtttgttagcgaaatcacgccatacgacggctcgttaggaggggtctcggactacattacataaggaagtagcgggaagtcctgaaccgaagacagaggtaacagatggtggatacagcgaataccgcggccgaaagccacgatagtaagccgttgcgcgtgggtctggatatcggatcgaccacggtcaaggccgtggtgctcgatcagaccaatgcgctcaatgacgtgctgttctccgactaccgacgtcaccacgccaacgtccgcgccacggtggctggactgctcaaggacatccatcagacgctcgtcgacctcggccgcggcgacgagcccattcgtctcgccatcaccggttccggcggcctgacgctcgccgacaacctgcacgtgccgttcatccaagaggtcatcgccgagacccgcgcgatcgacgaggaatacccgcaggccgacgtcatcatcgagctcggcggcgaggacgccaagatcacgtatctgaagcccactcccgaacagcgcatgaacggttcgtgcgcgggcggcaccggcgcattcatcgaccagatggccacgctgctcgacaccgacgcctccggcctcaacgattatgccaaggactacaagaccctgtacccgatcgcgtcgcgttgcggcgtgttcgcgaagaccgacctgcagccgctaatcaacgacggcgccgccaagcccgatctggccgcgtcgatcttcaccgcggtggccacgcagaccatcgccggtctggcttccggacgcccgatccacggcacggtcatcttcctcggcggcccgctgttcttcatgtccgagctgcgcgaggcgttccaccgcgcgctcgccggcaaggtcgacgagttcatcgtgccgaccgacgcccacctgtacgtcgcatacggctccgcgctgatcgctggggagccggatggcatcgacgtcgacggcgtgcatttcgagccgcgcacctgtgacgacatcatcgccgccctcgacgacctgaagaacctgccggcgaacacgccgaccatgcccccgctgttctcctccgaccaggagcgcgaggcgttcaacgagcgccaccatcgcgaacacatccacatcggcacgctcgaaggcgcgaaaggcccgcacttcctcggtatcgacgcgggttcgaccaccatcaaggcgacgctcgtcaacgacgaccgcgagatcgtatggtccagctacgccaccaacgaaggcagcccgttgaccgccgccatcaacatcgtcaagaagatccagtccgagctgcccgaaggcgcgtggatcgcccgatcctgcgcgaccggctacggcgagggactgatcaccaccggcttgcacctggacgagggcgtggtcgagaccatggcgcactaccgtggcgccgaaatggtcagccccggcgtcaccgctgtcatcgacatcggtggccaggacatgaaatacctggccatcaccgacggcgtcatcgactcgatcgccgtcaacgaggcgtgctcgtccggttgcggctcgttcctgcagaccttcgcgcagtcgatgggtctgaccatccaggagttcacccaggcggccctcaactccgaccatccggtcgacctcggctcgcgctgcacggtgttcatgaactcgtccgtcaagcaggcacagaaggaaggcgcgtcgatggagaacatcgccgccggcctgtgctattcggtcgtgcgcaacgcgctgtacaaggtcatcaagctgcgtgactccggtgagctcggcgacaccgtcgtcgtgcagggcggcacgttcctcaatgacgccgtgctgcgcgccttcgagctgctcaccgagcgcgaggtgacccgcccgaacatcgccggcttgatgggcgcgttcggcgccgccctgaccgcgcgcatgcattacgaggacgtggccgacgacgcgcacgaccacgacgccgaagtctccgcgggccagtccgccgatatggccggcagcgacgatgtcagcgcggagcacgaccacgaggtcgtcatcgacggcgtgcaccacacggcgtccaacatcctgtccggcgacgacctcgacaacatgtcgatgacctccgagcgcgacgtgtgcaagctgtgccagaaccactgcaagctcaccatcaccacgttcgccgacggctcgcgctacgttaccggcaaccgctgcgagcgcggcggcgacgcgaagaagaagcgctccgacaggccgaacctgtatgactacaagtacaagcgctgcttcgcctaccgcaggctcaccgacaagaaggccacccgcggcgagatcggcatcccgcgcgtgctcaacatgtacgagaactacccgttctggttcacgctgctcacctcgctcggcttcaaggtgatgatctccggccgcagctcgcacgagctgttcgagaccggcatcgaatcgatcgcctccgagaacatctgctacccggccaagctggtgcacggccacatcaagtggctgctgggcaagggcgtcaagaacatcttctacccgtgcgtgagctacgaggacaacctcgtgcccaatacggacaatcactacaactgcccggtcgtggccaactacccggtggtgatcggcgcgaacatgcccgaactgcgcgaggacggcatccgctacatgcacccgtacttcaacctcgccaaccacgagctcatggtcgaccgcatcgtcgaggagttcgcctgggcgaacgtgagccgcgaggaggccgagaccgcggtcaaggccgcgtacgccgaggacaagatcttcaagaacgacgtgcaggaggaaggtttcaaggcgctcgcctacatgaaggagcacaactgccggggcatcgtgctcgccggacgcccgtaccacatcgaccccgaggtcaaccacggcatccccgagacgatctgcgcgctcggcatggtcgtgctctcggaggattcgatctgcgaactgcagccaggggagaacctgcatctgagcgactacctgtcggaaggcgaggaggacccgcgcaagaagaacgcgaacggcttccgccacgtcggcgaccgcaaggtgaccgtctcccgcatgccgctgcgcgtcaccaaccagtgggcctaccattctcggctctacgcggcggcgcatttcgtggcgtcctacccgggtctcgaactcgtgcagctcaactccttcggctgcggcctggacgccatcaccaccgatcaggtggccgagatcctcgccgacaaggccgacgtgtacacgctgctcaagatcgatgaggtgagcaacctcggagcggcgaagatccgcctgcgttcgctcaaggccgccgtcgaggagcgcgaggccaacaagcggcgtctggccgcacaggcccagtcccaatcccgccagcaggtgctgccgaacaagcaggaccaaccggtcggccccagtgcggccgagcttgcggcgcagcgtcaggccaaggaggagctcgcggccgccgaggtgcagctcaaggccgcccaggaccagctcgccgccgcgcaggccgccgtcgaggccgcggagaagcagaagaacgccgccgagcagccggccccgcattccacgggcttccgcaagaccggatccgaggcgcccacgcccggccgtcaggtcatgctcgacacggtgatgaagagcaacccgcagctcaccaaggccgtcaaggacgcctcccaccgcgcggcgcaggccgagtcgcggctcgccgccacctcgccgaacggcaagtccgcgaggaagaccgccaagaaatccggccacaacaccgcgaccatgtcgaagtacgccaacaaggtgccgttcggcaagtcgatgaagaaggactacacgatcgtcggcccccagatgagcccgatccacatgtcgctggtcgagtcggtcatccgctccggcggatacaagttcgacatcctcaagaccgcgagccgcgaggacgtcgaactcggcctcaagtacgtcaacaacgacgcctgctacccggcgatcatggtcatcggccagctcgtcgacgccatcgtcaagggcaagtacgatcccgaccatgtggcgctcgccatcacgcagaccggcggcatgtgccgcgcgacgaactacttcggcctgatccgcaaggcgctgatcgacgccggctacccgcaggtgccggtcatcgcgctgtccacgcagggcttcgaggacaacccgggcttcaaggccacgcccacgctgctgcaccgcgccatcaaggcgctggtcgtcggcgacctgctgctcaaatgcctgatgcgcgtgcgcccgtacgaggtcgagaagggcagctccgacaagctgtaccagatgtgggacaccatcgtgcgcgagaccatcgaacaccacggcttctccgataccgctaagaagaagatcggcaagcattacctgccgtaccagacgctgctcaaggagatcgtcaaatcgttcgacgcactgccgctgcgcgacatcccgcgcaaggtgcgcgtcggcgtcgtcggcgagatcctcgtcaagtaccatcccgacgcgaacaaccacgtggtcgacgtcatcgaatcgcaggattgcgaggccgtggtccccggcatcatggagttcatgaccacgcgtccgtacatcaccgactggaacgagaagaacctcggcatgggcggcaacaagaagctgtactcgctcatgcgctggggtctcgaccgttacctcaacccggtgcgcgcggccatcgatctggcgcatggcaagttcagccaggacctgccgatgcccgagctggtcaagaaggcctccgaggtgacctcggtgggcgtgcaggccggcgaggggtggctgctgaccgccgagatcctggagctcatcgagtccggctgcccgaatgtgatctgcgcccagccgttcgcctgcctgcccaaccatgtgaccggccgcggcatgttcggcaagattcgccgtctgcacccggacgcgaacatcgtctccatcgactatgatcccggcgcctcacaggccaatcagctcaaccgcatcaagctgatgatcgccgcggcgaagaagaaccaccagaagctgaccgcggccgactgacggatcagcctcggcccggcgatcagccgaccagggtcgccgcgtaggcgtacagcctcttccatggcagggtcgacacgtctatcttgtcggccttgctctgaaccctctcgcggtagcgttccgtgcgcagcgccgtcttcacattggctttcacatcggcgagcggcgccttgccctcgaccccgtccacggtccagtcgtgcgcgtcgtaaaactcctgcacctcggtctcgctcgggttcatgcccggtttcgtggcgtcgtcgacgtagtcgttcttcagcgcggtcatctcgtagtcgatgtatgaggcgatgtcgtattcgctgcgtccgtagatgacctgccccgcttcacgtttctgccggttgttcgcgttgagggtttccatgcgcttgacgatgccggtgtacgagtcgtcgtcgaccagcccgtacgagactgcgatcaggtacgccgcgtgacggaagcgcagcgtgtcgatagtctgtttcgtcagccattcgaccggcttctcgccgccgtatgaggcggtccagtcggcgtcccgggcgttgaggttgacgtcgtgcttctgcttgaaatagctgacggcggcggtgcgctgcgacgaccacgcctgggtgaattcggcctgcgtgatggtggtgtcgccgaaggagaatttcgggaaggcctgcgtcgcgttggcttgcgcgtcgtccgtctttgacgagtcggggctcgccgtgagcgaacggacgagaaagacggtgccgacgatggccgcaatcagcaggacggccgcgacgacgatgatcgcgcgggttcccgtattggttttcgtccccatcttcgcggcgtcacggccgctcccgtccgttgccttgctgggagagcctgatccgcgttttcgtgactgcttcatgccgtcatgatacgcgacggacatgattgcggggtgtcgcccgcattgcgcaggaacgcccccacaatcatgtccgtcggtcgtcgccttggattccggttattcctggaatacgtccggatgcttcggatcgccgggctcgtcggccaacaggccctccaatcccaggaactccttccagaattcgagcggctggccatacggcgccgattgcgcgccgcgcgcctgcaggttcgccttcgcctcgaacacgtcctcttcgcggatatcctcgaagtagctttccagccgctccctgttccccggcatgtagaacagggacgcgatgatctccgtcagccgctcggcgcgctcgatcggcagcgaatcccaatgccgcagctcgatgaagttcttcatacgcacgtcgttgaaatgcgtggagatgatgtggttgatctcgtacgggttgagctcgcggtcgggatacacctctccggcgttctcatagaacgccgggtgatgcagctccttgccgctcaggcccttggcctccggcgtatgcgtcagatcggcgaacatcagcggcgtggacagcacgtcgatggcgtactcctcccagccgaaccgcttgtcgaacagtccgggaatcacgttcgtgcgctgggggtcgagatagtcccacatgcgctggcgtagcaggggccacgggttcggcgcgccctcgaaatacggcgtattgcggaagtaccaggcgaggatcggcccgatgatggtgcccagacgcagcttgtcgatggaatcctgctcgtcgacgtagtcgatgctcacctgcgtggaggccgagcaccgcatcatgcacgggccgaactggcctacccgccccaggtagtgggtcatggcgtcgtaacggtccttcgggttgaccttgacgtcggcgaagcccgacttgggctggtagccgtaattgaccagacggaagcccagctcgtccagcacgggatcgatgtcgcgccggaaggaacgatacagcgtcagcagttcctgcggcgtcttgaggatgcccagcgagcactccacctgaccgccgggctccagcgacacggcgatgccttcgcgcccgagtccgaccagatggccgttctcccagtactccttctccttgtcgtagtacggcgcgatgcgcttgagcagcgtttcgacgccgttctcctcgtagtagctgacggcggtgtcgtcgccgttgtgcaccggaagatgttcgatctccacgccgaaaccgcccgtgccgcgtttggaacggccttcctcgaagaatcgcagcagactgtcgatgtgcttgggattcggcttggcgagcagatgcgcgtaactgattctcggtgtcgtcatggggcatatcgtacctgtagattccatcggccacggcggtgccgttatacaaagaatcgatagctggtttgcgtccgaatgctggacattgcgaccgatttcccgggttccgttcagggggtacaagggtgacgttatgacagttaacgaaatgccgaatacgccataccccattgccgtagcctatgggtaccgctatacttttgaacttgtaaagtctctttacatattggtggtgtggcgagtccgtgaatgaccccggaagggggcatcgtcatggatgaccggatcgccgacatgtccccccgcaacgaggaggggaacggagactctccaataacagtaaggacaacgatgaaacctcatgtaggatcacggatgatcgcagcatcggtcgctttggggacggcgttcgcgttgatcgcgccgtcttcggcgctcgcgggcgatgcgacgccagcggcggcgtcgaccggaacgacatattacgtgtcgtcgacgcatggcgatgacggcaacgccggcaccgatcagaaccatccctggaagacgctggacaaggtcaacgccatcgcgaccgaccttaagccgggcgactccgtgctgctggagcgtggctccacgttccaggaccagtatctgcacatcaaggacacgtcgggaaccgccgacgcgcccatcaccatcgccgattacggcgacgcctccgccaagccggtcatcgcggcgaacggcgtcaagggcagccggtggtaccagaactaccgtgcgtcggtcggcaaccaccagaacaagggcaccgtctcctcggccatcctgctcaaggacgtgtcgtacatcacggtgaagaacctggagatcaccaatgacgaccccgacgtctacgacccgatcgacacgtggaagtggaccgacacggccgattcggatggcaccaagctcgaccgctcggccgaccgcatggaccgcaccggcgtggccggcatcgcggagaacggcacaacgatgagccatgtcacgcttgagggcctgaacatccacgacgtggacggcaacatctacaacaagcacatggccaacggcggcatctacttcatggctcactacgcccgcgagaacaagaacgccgcggacaacacgtggctgcagaaccacatctcgcgcttcgaccacatcaccatcaagaacaacatcgtcaaggacgtggaccgctggggcatcgccgtgggctacaccgcgtacctcaacttcatcgacgcggcgtggggcgacggcagcatcgacgacgacctgatcgccaagtacggccagaccaacgtgaccatcgagaacaactacgtcaagggtgcgggcggcgacgccatcaccctcatgtactgcgaccgtccggtcatccagtacaacgtgggcgacagcgtctcgaagcacatgaacgacgtcgactacccgcatgaccgcgagcacggcggcaggtacggcggctgggtcgcggcgggcatctggccctggcgctgcaaggacccgatcttccagtacaacgagatgtacaacaacctcaactccgagcacggcaacggcgacggccaggcgtgggacgccgattacggcgacggcacgctgtaccagtacaactactcgtacggcaactcgttcgcctcgctgatgatctgcaaccagtacgccatcaacacgacgttccgctacaacatctcgcagaacgaccgccgcggcgtgttcgacctgccgagcaacggtccgggcaaccacatctacaacaacaccgtctacatcggtaaggacagcgcggtgctgaccggccgatccaacagccaggcgaagttcgagaacaacatcttcatcaacgcgaccgacaccaagaagaccgagacgtggaaccgcggcaaccagcacggcggccagacgtacgacaagaacatgtacgtcaattacgcgaacaagcccgcctccgattccaacgccgtcgaggtcgccgatgtgaagaccgtgctggccaatgccggacacgcgccgagcgcgccgaaggccaccggttcggtctatggccgttccggcagcgagttcgacggatacaagcccgttgacggctccccggccatcaatgccggcaaggtcatctccgacatgaacgactacgcggtcacgaacgacttcttcggcaacaccatcaagggaaccccggacctgggtgccgtcgaaagcaacgtgctctccgtctccggcaaggtcaacgcgtacgagaccgccacggtcggcggctccaaggtcgtctacgtgccgttcaccgcgaagaacccgaccacagtcaagcagcttcgcgcgggcctgacggtcggtgacggatcagtcgccaacgtgtaccgcggcagcaccaagctgacggccgacgcggcgatccaggccgacgacgtgctgcgcttcgaggtcgaaggcacttcgaacacgccgatcgaatacaccatcgctcagaagaacgcatggaactgggtcgacgagttcaagaccgccacgggcgtggtctggaactcccagaagcagaacggcgccgacggtgactggacggacatcacgacgttctccaccgagtacccgatgtcgaagtacaacgagtactacggcgcgggactcaccggcaacctgtcggacctgccggcagtgggagctgcccgccccgggcgtcagggcctgctggtcgacgacccggatgcggccggcggcaccgccatcgtgtggaaggccccgaaggccggcaccgtgaaggtcacactcggccgcgacaacgagccgcagcggcgcaacgccaacgcctcgggcacggtgacgctcgcactgaccaagaacggcgagacgctgtgcactgcagacatctccaccgcgcagaccaagaacgacgacttcgtcaattgcctgaaatcggataagggcacggtgcaggtgaacgccggcgacgtgattcgcatcgcggcgaccgcggccagtggcgcggccgctccggacctgtacgtctcgccggtcgtcacctatcaggatgtggcacccgtcgagtcccagacggcgcagtatgctgcctcctacgacgcggtgagcgccaaggtcggcaccaaggccaccgctacggtgaagttcacgaagggcggtgccgccgccaccccgaccggcgtcaagtcctacgcgctgaagaccgcggtcgacggcgtgtccgtggacgccgcgaccggcgcggtcacctacacgcccggcgcaaatgcgtacggcaccaccaagaccgcgaccgtggtcgtcacctactcggatgacaccaccgacgaggcgaccgtcaccttcaacgtcgagaagtccaatgcgcagaagtacaacgtgctgtacccggccgtgtccggcggcgcgggcgtcgcgctcaagcgcacgcccaagttcacgctcaaggcggacagcgccgcggcgtccatccccgccggcaccaagttcgcgctcggcacgggcgccccggccggcgcgtccgtgaacgccgccaccggtgaggtcacgctgaccagcacccaggccggcaccatcaccgtgccggtgacggtcaccttctccgacaccaacgagtccatcgaggcgacggccacgttcaccgtgaccgctccggcggcgctcggcacctccaagctggagaccggcaccgcggacggcgcgaacgtcatctatgtgccgttcacctcgaagaccccgaccaccgtcgccgatctgctggccctggtgaccgccgagccggattcggccctcaaggccgtgtaccgcgacggcaccaagctggaggacgccgcggcagtaaaggccggcgacgtgctgcgcttctacgccgacggctccaccttcaccgccgactacacggtcgtgcagaagaacgcctggaactgggtcgacgacttcaagaccgactctcagggcccgatctggacgtcgcagcgtcaggtgtccggcaaatggcagacgattaccgatttcggttccgatgtgtacccgcagacgtactacgacaagtactacggcgtcggtgtggactatcagaacaagagccttccggccgaccgcagcgccatccacggcctgattgccgacaatccgggtgattccgcggcgacggcaatggcctggaccgcgccgaaggccggttccgtgaaggtcacgctggacgaggtgaccggagcgaacgtcgagccgtacatccgtcagtcgaacagcaacggcaaggatgtggtcctgaagctgctgaagaacgacgaggtgatctgctccgcgacgatgaccaattccttcgcgacggcgaccgggttcaacgaatgcctggcgtccgccaagggcacggtcaaggtcgcggtcggcgatgtgctgcgcttctcggtggatgccgcggccggcacctccaagtcgtcgatccacatcagcccggtcatcacctacacggatgccgatgagccttcgcccgagcctggcctgtcggagcagtatgctgcggcgtatccggcttcggttgcggcgaaggtgggcgagaaggccaccgccgcggtgtcgttcacgaagggcgccgccgccgcggatgccccggcgggcacgacgttcgcggtcgcgggtgacgggttcacggtcgccgcggacggtacggtgtcgttcacgccgacggacgcgcaggcgggcaagacggtgacggccacggtgacggtgacgtattcggacaagtcggcggatacggcgacggtgacgttcaaggtcgccgccaagaccgagccttcgcccgagcctggcctgtcggagcagtatgctgcggcgtatccggcttcggttgcggcgaaggtgggcgagaaggccaccgccgcggtgtcgttcacgaagggcgccgccgccgcggatgccccggcgggcacgacgttcgcggtcgcgggtgacgggttcacggtcgccgcggacggtacggtgtcgttcacgccgacggacgcgcaggcgggcaagacggtgacggccacggtgacggtgacgtattcggacaagtcggcggatacggcgacggtgacgttcaaggtcgccgccaagaccgagccttcgcccgagcctggcctgtcggagcagtatgctgcggcgtatccggcttcggttgcggcgaaggtgggcgagaaggccaccgccgcggtgtcgttcacgaagggcgccgccgccgcggatgccccggcgggcacgacgttcgcggtcgcgggtgacgggttcacggtcgccgcggacggtacggtgtcgttcacgccgacggacgcgcaggcgggcaagacggtgacggccacggtgacggtgacgtattcggacaagtcggcggatacggcgacggtgacgttcaaggtcgccgccaagaccgagcctgagcccaagcccgaaccgaccgatccgaaggccgacctgcgcaaggaggtcgaatccgcgtcgaagcttgacgagaaggactacaccgccgactcgtggaaggtgttcgccgcggcgctcgataacgccaaggccgtgctggaggacaaggacgccaccgaggcgcagatctccggcgcgctcacgacgctgaagtccgccactgccgcgctggccaaggccggcgacaccggcaagcccgacgatggcgacaagccttccgcgggcaagcccaacgacaagggcaacggtctgtccaagaccggcgccagcgtcgccgtcatcggcgttgccatgctgctgctcgcagctgccggcttcgtcacggtgaacgtcgttcgccgccgccggtaacggcatgacgggcacccgcccgtaacaagcaatcaggggtctcatggtcagccatgagacccctttgctatgcctgttagccgctctctcgctgtcgattaccctatattcccgcgaaagtcccatttgcggacgctggaatgggactttcgacggatgggagcaattgttcaacacgccgattgttgtatatgcaactgttgtatatggtatgcattatcatgttatgttgcctgaatgttcggaatgcgattttcgcatcgacagacatggtatggaggggtatggagcaacgtattctcagcattgaaatacgggcggtgagtaaggccgtcgaccgttatttgggcgaaagcatgccgctctccgccaaggagaccaccggcggcaacgcgcatatcatcatgttcctggcgcgcaatcgggatcgggagatctatcagcacaccatcgagcagaaattctgcatcacccgttccacggcatcccgcgtgctggcgctgatggagaagaaagggctgattgcccgtgaatccgtggcgcacgacgcacgatgtaagcgcattgtgctgacggataaagccgacgccatcgtcgccgatctcaaagcgaacggggagcgtgtggagcgtcttctggtcgacggtttcacgcaaacggagcaagatgcgctgcatgactacgtggagcgcatgcgtgccaacatcgagcgcgcacaacatgaatttgaacatcagacatcctcccagacgccgtcaacggcggctcccgaatactcggaagcggaggtcatcaacacgaaggaggagaacaagtgagcagcaccgaagaagcgattgcgcaagcgcgcaaagccgtggaaccggacaagccgaaacatgtcctgcgcacgctgggcaagtcgatccgcgagtacaagaaggccagtctgctggccccggcgctcgtggcggtcgaaggcatcctggaaatcctgatcccgacgatcatggcctcgctgatcgacgagggcatcaccggcggcagcatgccgtctaccatcaagttcggagtgatcctgctgatctgtgcgatggtctcgctgggtgccggcttcctgtccggcaagttcgcggccatcgcgggcgcgggcttcgccaagaacctgcgccaggaccagttcaagaaggttcagggcttcagcttcaccaatatcgaccggttctccacaggctcgatcgtgacccgactgaccaccgacgtgacgaacctgcagaacgcctacatgatgattatccgtctgggcgtgcgtgcaccgatcatggtgattgtggcctggatcttctcgttccgcatctccccgtccatctcgctggtgttcctggcctgcatcccggtcctggcgatcggcctgtgcggtctggccgtgctcgtgcaccccgtgttcgagcgcgtgttccacacttacgacgcgctcaacaacgtggtcgacgagaacctgcagggcatccgcgtggtgaaatcctacaaccgcgaatccttcgaggtgggcaagttcggccgcatctcccagcgcatcttcaaggacttcaccaaggccgagcgcatcatgagcttcaacagcccgctgatgatggtgtgcgtctacgcctcgatgatcctcatcgcatggatgggcgcgcagcagatcgtcgcctccggcaacaacgccgccgtgggcctgaccaccggcgacctgaccgcactggtcacctatgccatgcagatcctcatggccatgatgatgctgtcgatgatcttcatcatggtcattatctcccaggcctccgccgagcgtatctgtcaggtgctgcaggaggaaagcaccgtgactgatccggccaatccggtgaccgacatggccgatgggtccatcgaattcgaccacgtcaccttccgctactccgacagctccgaaaagcccgtactcgacgacatcaacctgaagatccgctccggcatgaccatcggcatcgtcggcggcaccggttccgccaagtcgagcctcgtgcagctcgtgccgcgactgtacgacgtgagctccggctcgctcaaggtcggtggcgtggacgtgcgcgactacgatctggaagccctgcgcgaccaggtgtccatggtactgcagaagaacgtgctgttctccggcaccatcgccgagaatctcaggtggggcaacccgaacgccaccgacgaggaggtccgccacgccgcgcagcttgcgcaggctgacggattcgtgcaggaattccccgacaagtacgacacctacatcgagcagggaggcaccaacgtctccggcggccagcgccagcgcctgtgcatcgcccgcgcgctgctgaagaagccgaagatcctcatcctcgacgattcgaccagcgccgtcgacaccaagaccgacaagctgatccgcaacgcgttccacaacgagatccccgacaccacgaagatcatcatcgcccagcgtgtcgcctccgtcgaggaatccgacatgatcctcgtcatggacaacggccgcatcatggcgtccggcacgcacgacgagctgctcgccacctgcgacgaataccggtccatctacgaatcccagaccaagaaccaggcccgacccgaggagctggtcgccgcggagccggccggggcgcaatctgagaccgaggccaaggaaggagagacgcgatgagcaacgaccagagcttcaagaaccgcaaacccggcatgggcaaagccgaacctgacaccatcaagcgcatcttcagctacatcttccaatacaagtggcgcgtcgtcgccatcgtgatctgcatcctgatcggcgccgccgcgcaggccggatccgcgctgttcctccagtccctcatcgacacgtacatcctgccgatggtgggggagacaaatcccgactgggcgccgctgctgcgcgccatctcgcttatgggctgcctgtacctggccggtatcgtggcgtcctgggcctggcagtggctgatcgtcaccgtcgaacagggcacgctcaagaagatccgcgacgacatgttcgcccaccagcagaagctgccgatccgctacttcgacagccatgagcacggcgacatcatgagccactacaccaacgacaccgatacgctgcgtcaggcgatctcgcagtcgttcccgcagatgttctcctcgatcatctccgcgctggcggcgctgctgtccatgctgtggctctcgatcccgttcaccgcgttcgtgatcgtgttcaccgtgctgctctacttcatcgtgcgcaagatcgtgagccgttccggccgctacttcgtcaagcagcagatgtggatcggcgacgtgaacgccttcgtggaggagtccgtcaacggccagaaggtcatcaaggtcttcaaccacgaggacgccacgcagaagaccttcgacgagaagaacgaggagctgttcgaggcgtccgccgaagcgaacacctggggcaacgtcaccatgccggtggtcggcaacatgggatacctgctctacatcctgctcgccatcatcggcgcagccgtttcgctggccggcgtcaatgatctcggcctgaccggcgtcaagccgctcaccctcggcaccctcgtctcgctgctcaccctctcccgttcgttcatcaacccgatcggccaggtctcccagcagatgaccatggtgatgatggcgctcgccggcgcctcccgaatcttcaagctgatggacgagcccgtggagtccgacaacggcaccgtcacgctcgtcaacgtcgagctcggcgaggacggccgtaccatgcgggaggtcgaccacgagaccggccactgggcgtggaagcgcgaggaaggcgacgacggcacgaggtcgctcaaggccgccgagaaactgcacggatccgcgcgcgaagtggccgtcaaggccaaggagcaggcgattacctcgccggacggccgctacacgttgctgcgcggcgatgtgcgcttcaccgacgtgaccttcggctacaatcccgacaagccggtgttgcacgacatcacctggttcgccaagcccggtcagaagatcgcgctcgtcggtgccaccggtgccggcaagaccacggtgaccaacctcatcaaccggttctacgacatccagcagggccagatcctctacgacggtatctccgtagccggcatcaagaagccggatctgcgccgttcgctgggcatcgtgctgcaggacgtgaacctgttcaccggcaccgtgatggacaacatccgctacggccgactgaacgccaccgatgaggaatgcatcgaggccgcgcgactggtgaacgcggacggcttcatccgcatgctgcccaagggctaccagacggtgctcgaaggcgacggctccggcctgtcccagggccagcgccagctaatctccatcgcccgcgccgccgtggccgatccgcccgcgctgatcctcgacgaggccacgtcgtcgatcgacacccgcaccgaggaggtcgtgcaggccggcatggacaacctgatgaagggccgcacggtcttcgtcattgcccaccgcctgtccaccgtgcgcaactccgatgtgatcatggtgcttgaccacggcaacatcatcgaacgcggctcgcacgacgacctcatcgcgcaacgtggggagtactaccagctctataccggcgcggtggaactggagtagccaaggactgccttcggcagaccgtcatgtttcctcggcactgtcgtgcctcggcatcgcctatggacagcccaccgggcttcccgcttaacggctccgcagctagtggctgatattccagtcgctggcattatccgcgaaagtcccatccgaacatgtcggaatgggactttcgtcgggtgggggaggagtggccttccccacccgacacgataattgggggtgtgcgccacgcctcagtttgccaggtagttggcgatcgcgccggcggcggcgtagcctttgcggtacatgagttccagtccctcgaaggacttgctcagtgtcgaaagcccgcacaggtcatcgggcgcgaggatgagcacgcggccgtcgcgcccgtactccttggccaaggcaacctcgtcgttgtaggtggcgtatcggttcagcagtcgctcagcggcggccggataggaatgccgaaggattcgcgccggcgcgatgtcgcgcttctgctcgcgcagcacgtccttcggccttgtcagcaccagcacgatgcggtcatatccgtcgtcaatggccttctgcacggggaccggatcgacgatgccaccgtcgaaatacgggacgccgtcgatcacatacggctcgcaggccacgggcacggccgacgaagccttcatgatgttgaaatcatcgtaatgcacgtcggacttgtcgaagtacttcgcggaaccgtccaacgcattgcacgcgatcaccgtgaacccggtggggttcgccgcgaacgcctcataatccaccggatattcgccgtcgtgattgctcagcgtgctgtatacgtaatccagattcgcgaaattgtggtgcttgacatagctgtcgaagctggcgtattccttgcggaaggcgtattcggtgtagaacttgtggttgcggccgtgctggccggcgaggaacgacaccatgttggcgctgcctgcggagacgccatagcagtggtcgaacgtgatgccttcctcctggcagcggtccatcacgccggctccgaatatcgcgcggaagcctccgccgacatcgatcagcgccgtcctgtgcgagggtttcgattgtgcggatacatcactgcgctgtgtgtcggtgcgttgcgattcgaccgtctcggctgcacccgcgtcccgtgcgcccgtatccgcgtgtgccgtggccttgtgaccgttgtccgtcgccttcaccgtcatcgtcgtcccctttcgtagtgtcgtccaagtgtacgcccgttatgcagacaattacggtgtctgccagggtcgcccgatctagctgtgcagcagttctcgtgacagcgcggcgatgcgttcgccgctatcggaattcgcgatctcgacgccgccgtccatctcctcgggagcaagcttccccaacgattccagaaccatgcccagatgccggaccgttccgcgattgccgtcgataatcgcggtcgtcgacggcagcagctcacggaagtagttgcggtagaacacgaaatgcgtgcagccgagtaccaccgagtcgatggacggaaggtcatagccgtcaaaataccggtgcagggtgcgcatcaccaggtcatggtcgcaaagccttccgctttcgacgatttccaccagatcggggcacggctggggcgaaatcatgttgttcgccttgaaacggtccatcagtgcggcgaacttgtgctcgcgcagcgtcagcggcgtggccgcgacgatgacgtgctgcggcatgtgccgtgcaggcgcggtcccgtctcccgcggcggtgtcgccccgatcgcaggcgaccttcagcgcgggctccatgccgatgatcggaatgtcgtaatggtcgcgcaacgcgttcaccgccgcggacgtggcggtgttgcaggcgatgaccaccgccttgaccccctgactcatgaacctctccatgatgtcgaagctcagccgacgcacctcctgcggggtcttcgtgccgtatggcgcgttcgcggaatccccgaaatacaggacccgctcgtgaggcatgtcctgcacgatctgtcgcaccaccgaaataccgcccaagccggaatcgaatacgccgatcggtgccgtcgaagtcatgtcccatcgcctttccaacgtctagcggccaagccttcctgccgggaggccgtgtcatcgaacgcccccatactatcgcacaccgttatccggcgcatgcgtttgcggccgcagcgcacgatgtcgtcgcacggccgcaagcgcagcagtcgtgcagcaacgcatcggctgtacagcaacgcatcggacggccagcccattcgcgggctgggagtactctggcagtcatgagtatcccgaaaagcgtcaccaaggcgcatgcgaccggcaatgatttcatcgcgtatctggattccgacggccgtttcgagccgaccgccgatgaggtgcggcaattgtgcgacaggcatttcggcatcggcgccgacggcctgctcaggctcacgaaaccgcagtacgtcgccgatctgagcgaggcgcaggtcgcggcgtgcgatgacggagacgccgagtggttcatggactatcgcaacgccgacggatcgctcgcagagatgtgcggcaacggcacgagggcgatcacgctgttcgcccagcggtgcggcgtggcatcgacgcaggtggaggagccgttccgcctgggaacgcgcgccggcgtcaagacgctgcgtccgctcggcgacgtggcgccatacggcagggatgtgttccgcgtggacatgggctcatggcggcgcggcgaccttgacgccttcacggtgaccattcccggcacgtcgggagccgcccgcggcacgttcgtggacatgggcaatccgcatgtggtctgcgtgatcgaagacgcgatgtccacgctgccaagggtcgaggatctggatcttgtgaccaagccggaggtctcaccggtgctggaatccgaccagaacgcggagttcgtgcgcgtcgacgagatcgacgctgccgcagggacgggagaggcgaccatgcgtgtcaatgagcgcggttgcggcgagacgctgtcctgcggcaccggtctgtgcgccaccgcgatcacgctgcgcgccaaaaccggcgtagatcactgggacatcaccgtgcggggaggcacggtgcgggtggacgtcaccgatgagaccgtcgcgctcaccggttcggccactctggtcgcggacgtgacgttgatctgatcgatcgaggctctcaaaacttgaagatacaaaaaaggaaccgccattttccaacaatggcggttctctatcttcgagttttgagagcctcgttttcgtatcaggcgaaaatcgccggcccatccacgacgataatcagcacgatcagcgcaatgatccagaccacgtccaccatcagatcgaaattcagccggtagtacttgcgcaggccgttggatttcgccggcatccgctgcacgctcaccgtagcgtgcgacagcgccatgaactggatcgtcgtggcgaacatcaggcccaggcaccacgggcacagggcgcggatcacgaacatcgattgggcgaacagccagtaggcgtacgccaaggccgcgagtccgcccagccatgtgcaaagcgcgaaccaacgcggcacgacgaccttggacaggcctatcaccgcaatcgtgacgaacacggattcggcggcgatgccgaagaaggcgttcgggaagctcaatccggcgaatttgatgaactccgcctgccatgattccgccacggtcgagcaggaaaccacggcattcacgtcgcagccgagcttgacgccgggattgcgggcgagctgcagcgtctccgccgacagcatgagggagacgaacaatgccgccgcggaggcggccaacatgaccagatacgtccagaccgcgccatgacgccagccggtgagcccggcgtcgacgctgatgtcagcctgtttgactgcatcgctgttgtgagtcatacatcatccttacgttcgaggagaccgtgatgagggtggctgacaacgcggcgatatcacggtggttcttaaattatcgcggggttatgacgcgccttgtgcaataaccgacagcacacagcttacgatggatacatgactcgtttagcacttgccgccgcgccgccgaagtcgggctgggacatccactgccatacggtgtattcggacgggacgcagaccccggcgtccctggtcgaactgagccgccatatcggcctgcacggggcctcgatcagcgaccatgacacgaccagcggatgggcggatgccgaggccgcggcgcgcgaggagggcatgcgcctgctgcgcggcacggagatcacggcgtgcgatgggccggtgtcggtgcacatgctcgcgtatcagtacaatcccaacgaccgtcatacgtcggacctgttcttgcgcacacgtcaggcgaggctgaagcgaaccaaggccatggtggcgcgactgggcgaggattatccgatcagctggcagtctgtgctggagcaggtgcacgagggggagcggaccacgatcggacgtccgcacatcgccgatgcgctggtcgccgcgggcgtgtaccgcacgcggtccgaggcgttcgccgacgcggtgagcgccacatcgaagtattacatccccacgccctccccgaccacgcacgaggtgctcgccgccgtggccgcagccggcggcgtggtgatcatcgcgcatccgggcgcggtgaaccgcaacgtgacactgctgtccgacagccagatcgagacgctgatcgaagagggacttgacgggctggaggtatggcatcgggacaatccgccgcagcagcgggaacggctgtatgccatcgcgcaggcgcatcagctgctggtcaccggcggatcggactggcatggcgccggcaagccgaaccatctgggcgagaacctgactgatgacgagaccgtggccgagatcgtgcggcgaggggcgattccgctggtctgacaccgaccatcgaccccggttgtagagaaaacacaaagccgggagcggccgcagggcgttcaaaccctccggtcgctcccggtcgtcactgtatatccggccgattcccgcctacgcacaaaggcgggagaggggagccagctgagcccggcgttcggtcagagcgccccgaagcctacggcgtgcttggtctcggagccgatgagcgcgtatccgagcgcgttcgccggcacgatgatgcgacggcccttgtcgtccgtcagcttgatcggggttccggccgacagcgccgattcgatggcctcggtgacgctggccgcgtcctcctctgtgctgaaggtgacgggtcgcgccacattggcgatgcccaattcgatgtccatgtttgctcctctcgggatgatgcgctgttgaaggcgctgggtggatgatgtgtccgacgcccgtttacgccacgggctttcagtcgcatgcacgcgtgccgatgaaagccattgtgcattgctcccatcgacgtgcgtgacggttttcgctgtaggctacttgccttgcgatgactgcagctcggactgggcgtcgcgcatggcgcgttcctcacgttcgagcagcgggatgacgatggtcggggtgtcgcgcgccgccgacgcgccgtcctgtcggtccggcgttgccggcgtcgcttgggacggggcgtcttcgatatgggcgttcggcgtgcggtcgtcggtatcgtccgtggcgcgtgttgcgtctgcatcgcccgtgtcgtcgctgtccccgcggctcagcgtcatcgtttccgatgtcgtgcccgccgttgccgtgacatgttccgtctcagcgctgtaccgaattcccatggtctgcggatcgaactcaccggccgccttgatgtccgcggaaccggtgcggtcggtctcgtcggtgttgtcgttcgggtcggcgatgtcgtcgggcacacgcgctccggcctgtgtcgcggccgcgaccttgcgccggtcgtcgtcattgagcagcgtgccgacggtgatggtcgatggcggcttggacgactgggcacccgacgtcgtcgcgggcgcggtcttacgcgtgaatgcgccgagctggtgggccagccgctccacctgcgccttgaactggatgattttctgactatcggcccggttcaacgcatcgatgaactcgccgacctgctccatttgcagccacaggttcgcgcgcagcatgatcagatcgtccagacgagaacccatcatgcggccatacgccgcaagcaccgcattgcggtgatcttcgtcaagcttgccgaaaatccacgcgagatcgcgtgccggatcgttgacctgcatgttctgccagttcgtcaccgcggtgatggtcgcgctggaaaacagcacgtcgccatccgagaacccgccatgcaccgggcaggtgacgaacgaccacaggccctccgtctcgatgatccggccccagctcgacgtgatttccggcggcacatggcccgcctgccgcagccgcttgatccaggcggtcagctgggcgcgaatctgcccggtggagaataccggatacgattcggcctgcaggaaattcggccgcagccggtgaatggcgccgatggccgtgcccatcgccgcgcaatcatccaaagtaagcagatcgaggggtcttgcgacgccatcgttgtgcgccgccaccatcacggtcgcgccgccggtgagcgtgcttttctccttgccgtcaacgaatgcaagcaccgtatccagggcgaatccgagaccgcctggatccttggcgcgctccagcgtcctggcggccttcactcgcccggtcaggcgcttgcggccgtcttcggtgtcgcatgcgtatatgtcatacatcctgcctgcggcatcctgcatcacggcctgatcgatgcccgcggcgtcgtcggtgtcgttggcccgttcgctgtctcgcacgccggccatgacgatgctgggcatcgccgccgaggcgagtgccgccaacataagcttgcttcgttgagtcacactcccacactaatacaatgtcgcgcctcgcgggaggcaattggccgtatgactcgcggaaaatcacggtttgcccactatgctggcagcgcatcggccgggcatgcgccacaatggaggatatgagtgcatcgagcgagacgattcttgaggggctggacgatgcgcagatgtcggccgttaccgcgttggacggcccggtgcgcatcatcgcgggggccggagcgggcaagacccgcacggtgacccgtcgcatcgcctatgcgtgcgcgcggggggattgggatgcccgcaaggtgctcgccgtgacgttctcggtgaaggcggccgcggagatgcgcgcgcggctgcagacgctgggggtcggcgacgacgtgaccgctgcgacgttccattctgcggcattgcagcagctgaggcgtgtgtgggacgacatcttcgagacgccgctgccgcacgtgacctccgaccagcgcgagaccgtggagagggcgatcagacgggtcaccaatgccgcggacatcgatgcgcagcaggtgcgtgacgtcagggcggagatcaactggacgaaggtgtcgctggtggcgcccgacgactatccgcgcgtgtgctcggcgacgcaccgtcagccgccggcggagctcgatccgcagcgtttcgccgacgtcatcacggcgtacgagtgggagaagacggtccgcggacagatcgatttcgatgacattctgctgctcatgtgccatgtcatggatgattacgaggagttggccgcctcgatccgctcgtcgattggctggctgacggtcgacgagtatcaggacgtgtcgccgttgcagcatcggctgatgacgctgtggctcggaaacaaccgcaacgtgtgcgtggtcggcgatccggcgcagacgatctactcgttcgccggggcgagcagctatgacctgctgcatttcgcggacgagttccgcccgctggccgccgacgtcactctgaacacggattaccgctcgacgccgcaggtggtgcggtatgcgaaccgggtgctggccgccgcgccagaacgggaacagtatctggtgctgcgttcggcgcgttcgggcgggccacgcgtgggccacacatgctatgacaccgatgaggaggaggcgcggggcatcgccgcgcggatagcgcgtctggtcgccggcggtgtggatcccggcgattgcgcagtgctgacgcgcatcaacgcacagcagcccgcgatctgcgccgcgcttcgggccgagggattgcgataccgggtgaggcgtgactccggatggcagaactcggcgctcgcggatgatgcgcagagccgtctggccctgctggaggccaagggattgagcgctgcagcctcatcggtgaccgtttcgacgattcacgcgtccaagggtctggagttcccgtacgtgttcatcgtcggttgctcggaggggctgattccctacggcgcatcgattgcgggcgaggctttggaggaggagcggaggctgctgtatgtcggcgtcacccgcgccgaggacggattgcacatgtcgtacgcgcgggccaaggacgagggctcccgtcccaatcgcctccccagccgcttcctcagctgacccaaggcacatgtcgcatgcccccgctggcgggggcatgcgacatgtgtggtgacgttacttggcggaatcgttttcgtcgttttcgccgccgtcctcgtcgagcagtttgctcagttcggcgtcccagtcgatggcgccgccatcgttctgcgcctcggctccgttcgcggcgtcctttgtgccgtccttcgtgtcacctgcgacggaagctccgtcatccgttccggccctcgtaacgcctgaggccgtgtcccccgcggctccggagtcgacggtcttggcctcatcgggcaatgctggcagcagatcggggtgggaccaggtgccgtcgcgcccttcgacaccacgctccgcggtgatctgctcccagagggccgccgcctcgcgcatgcgcttggggcgcagctgcatgcccagcagcgactcgaaggtgcgttccgccgggccgcccaccgcgcgcttgcgcctcatcatctcacgaagctgctcgatatgcggaatgtgcgccatgccggcgcgccacgtcacgcaatccacccagccctcgacaagcgccatcagcgtctccagcgagaccagcgcctcacgctgctcgggcgtatcggggatgcccaccttggtcaggttcaccgcgccggagatcgactccggatccatcgcgcccgcatcgcgaagctgctcctccatcgcgtcgagatcgatggtgatgccacgcgcgtatttgccgatcagcgcctcgaaccgcggcatcagccacggcactcctgcgaacagacgggcgtgcgcgacttcgcgcagcgccaggaacgccgtcacctccgcgacagggatgtcgagcgacgtcgcgtattcctcgatgttctgcatgatcagtccgcccgcggggttcttgagcagcgcgatgccctggtcgaagctgccgttgacctcgtgcgacaggtctcccgcggcgtgccccagctgcatggcgaatgacgtgttgcccagcagcttgatgagctgcccgggatccttcatgccatcggggacgggaatcggcaccggtccggcgaacatgcccgcgatctcgccgttgaacgagttgccgagacgctcggagatcaccgaggcgagcgcgtcgttcatcgactgcgcgaccggcccggcgaatttcgcccacgattccagcgtgtcctcgacccagccggcccgtgtgagcatctgcgcctctcctgaggtcgggtcgaacgtgcaggccgtgtccagccacaggttggcctcgctgagcgcccgccgcgcgatgtcggccgactgcgcgctcaccgttccctgcgagccgtcggcgttcgccttctgcaatgcgatggacttggcgagtttcacgttgatcggcccggattccacggtctgcttcatgtctccgaacgtgttcagtccgccggcggtgaacgcctgcatgagcgattgcacttcctcgggcttggggagcttgccgatatcctggctcatcagctgctcgcggatctcgtcgggcagctgcgaaagctggttccatgccatttcgccctgcaccggtccgaagcaatcgatgaaccattgccgcatcgcgttctcatccatggtgtttcccgccttatgtgttaacgtcagttgattccatattatgggaggtatggcgaatatgcatgaaaacaaccaacttcacgcgcacagcgcactttcgcgcatccgcaactacctcggctcgcactcgctcaggtatttcgccggtgccatcgccgtgatactggcagtggtgacgatgctgctgccgtccgcgtatacggtagagggcccggggccgacgcaggatgtgctcggctcgtcgtcaggctccgatgtgatcagcgtctccggcactgaaacccacaaggattccggcaagctgctgctcgtcaccgtcaacgccgccggcgtgcccgggtatcccgtcaccaacgctcaggcgttggtcgcatggcttgatccgaagcagaccgtgatgccgcaggaggtcgtgttcccggtcgggcagaccagcgaggagtacgccgaggaatcctcccatgagatggactcatcccagtcgtcggcgaccaatgccgcgctctcgtatcttaagggcaagggcatggacgtctccggcgtgaaggtgtcgatgcatgtcgacgacatcggcggcccgtccgcaggcatgatgtatgcgctgggcgtcatcgacaagctcaccgaagccgatgagaccggcggcaagaccatcgctggcaccggcacgatcgacgcgaagggcaaggtcggggccatcggcggcattcggctcaagatgctgggcgccctgcgtgacggcgcgacatggttcctcgctcccgagtcgaactgcaatgaggtggtagggcacgtgccgcagggcctgcgtgtcgtcaaggtgtcaacgctcgatgaggcgtatcaggctctggtggcgatcgggcaggggcacaccgacggattggccggttgcaccgcatcgtgagtcgcccatcccggcccgccggaacgtgtccggacgaggcatggaaccggcctgtccacgcggcagcgggacggccgggaatcggccatgagacggacgccgtccatcggcatgtcctgtatcaattgcgagaaaatcccaaaaaacatccggtttttcggagtgttaacgtcgctgttcccagcgttttggtaatgtgttcaccgtgaatgaaacggcatcacagaacggtgaagaatttggtttccagtccggcgacatcgtgcaggaatggctgtgggatgacgacgtcgatgactcgttgcgcgccaagattgaggatctgaccggcgaggatctggtcgacgaggactatgattccgcagtcgacggagccattgtctggtggcgggacggtgatgacgaggacgagctgtccgacaccatcgtggacgcctattcggtcgtcggcgatgatggccctttctgggtgctgacccccaagcccggcaggaccggcgcggcgagttccagcacggtccagtccgccgccaagaccgccggcatgaacgcggccaccccgctcaccgtaagccctgactggaacggcatccggcttcgggcgttcggcaagggacgctgatccggcctgtccgccggcacgataccagtggacgatatcgacggcggcatcatgcatgccgccgcatccgacgtacggcatcagaggcatcatgcatgccgccaccacagccaacatgcccggggcgcgaaccgccgcacatggaatgagccgtgcacaccgtgaagcgggccccgcgaatcagcgctgcgccacggattgcttgtcaatcagcgtgcaatgaatcttcgccggtattgaggcgtccaacggcggcaggggagcggtcgtctccggttcgtcatcgtccggctcccgaccctcgatcagcgataccaatttgcgcgtcgcccaataccccatctcataatgcggcagctccacggtcgtcagctgcggctccagcgcctcggcgaacacccggtggttgtccacaccgatcacggacacgtcccggccgacgaccaggccacgtctcgccgcgttctcgtacacgtaccatgcgcgggcgtcattgaagcagaagtacccgtcgggccgcctccgctcgaacaggtcggtcacggtctgcaacgcaggcccgttgttcggcacggcgaccaccagcgactcgtcgaacggcatgcccgcctccaacagtgcacggcgatacccctccagccgtccctgctgcgcgatcgtcggctccgagcagccgatataggcgatgctcgcgcagcaggcgtcgatcagccgcttggtcgcgtcgtagccgatgagcgtttcatccggttcgatgctggcataccggccggtgcgatccgtggcgtcgacgagcaccagcggataatcgtgcaacggtttcggcacgtcggtgaaacggttcgacatcttcgcgtaaaggaacccgtccaccccatagcgtttcagcgtggcgatctccctcgcctcgtcgctgttgccgtcggtgttcacggtcagcagcatataccccaacttgctggccgcgtcctgcgcaccgaggatgattccgcccgcatagggcgtggcggcgatctcctcgctgatgaaacccaggatgcgcgtcttgctggtgcgcagcgagcgtgcaagcggattaggccggtagccgagccgcttggcggtggcgcgcacctgttcggcgatggcgggtttgacccggccctcgtcgcgatcgttcaataccaaggaaacggtagagaccgacacccccgttctctcggcgacctccttcatcgtcgtcatagggagaacgatacacgcaatccgcgggtttcgcaggattgttcacgctattgacatccgcctgccggtgccatgcaatcgctcggtggcggtcatctggcggcggtcgcgggcacaggcagggcggcggttattcgtcgccggtcactcgcttttgccggagaggatggcgtcgacgatcttcggcttctcggtgagctgaccggtgaatccagggcggatgtccatgtgtagcacgaggctcgtgcggtagccctgctcggcgagcttcttggcggcctcgccggccactttgagcacctcgtccaggtcgccttccacgttggtgaacagcgcattggtctcctgcggcaggccggattcgcgaatcacctcgacggcctgcgccacatacggcgacacctcggagccgacgccgttcgcggagacctgtatagccgccacggtgttgagatacggcttgccggtttccgggtcgatcggcacttcctgcgtgacggcgttgcggtcgatggtcatatgaatgccccctgattggttggttgttgctgtgttggatggtctgtatatacggtatgttccgtccggcgtcgccataagggatccgcctgccgcgtgcaggtcagcgccagtgccatgcgtggtccatcggcccggaaccgtggccgaggttcagctgcgcaccgagcgctccggtcagatagtccttggcatgacggatcgcgtcgggcagtgcctcgcctttggccagattcgaggcgatcgccgacgacagcgtgcatcctgtgccatgcgtgttcggattgtccacgcgcacgccgtgaatccatgtcgcgacgccatcggcatacagcaggtcgctcgcgtcggccacgccatgcccgcccttgacgagcaccgcgcagccgtaatgctccgacacggtgcggccggcgtcctccatcgccgtatcgctcacgatacgcgtgctctcacggtcggtgtcctcagcccatttcgcagggtccagcgaggctccccggtgggcgatcaggtcaagcagcacctcggtttcggggatgttcggcgtgatcacctcggccagggggaacaggcgctcggtgagtgcagtgatggcgtcgtcatcaatgagcttggcgccggacgtggcgaccatcatcggatcgagcacgatatgacgtgcgtgatgggcctccagccggtccgctatcgtgcagatgagttccgccgacgataccatgccgatcttgaccgcggccggcggaatgtccgtgtacaccgcgtcgatctgtgcggcgaccatgtccggtgtgatattctgcacacccgtcacgcccatcgtgttctgtgcggtgatcgcggtgatcgcgctcatgccgaacaccccgttggcgagcatggtcttcaggtcggcctgaatgcctgcgccgccggacgaatcactgccggcgatggtcagcaccggaggcagcgtggattgcgccgccgttgtgtcaagttgctctgtcatgccgttcattgtagccggatggtcttgaaattgcgctgtttctatggtgagatggagtcgttttgcaatcgccgaccatggatcggcgaccacggataaaggagagctgcggcgagatggcgaatgacgatatccttcggcgtgatggtgttctggcgcgtatcaccggcttcgatgaaggacgcaccgcatattatgcggtgatgccgaacggccacagcacgcagctgacgttccccagccaggagatcttcgacatcggcgacgtgctgctggtcggcaaggacttctatacgaaggtgccgccctcggtgtggccggtcaagccgcgtgtcggcgtaatccgccgtgcgctggaggactgcgtggtcatcgagacctcggatggtctggaattgctggaaggtgaatatccggtcgacatcgcgcccggaaacacggtggagttcaccgatctgttcggcatcgaacgggtgctgtggccgaccgcgatccggccgggggagtccgaccatgatgacgacatcaagcagtaccgcctcacgccgagtgccgatccgtcgctcacgttcgcggcgttcggtgggtatgagcgggtgatcgcccgcgcgaaggagctgatcgagacgcagctgggcaacagcgcccagatgcgggcgatcggcgcgaagcccatcaagggcgtgatcttcaccggcgcgccgggtaccggcaagacgcacctggcccgcatcatcgcgaacgtggctgacgcccagttctaccttgtctccggtccgacgatcgtcagcaagtacgtcggcgacagtgaggagacgctgcgcatgatcttcgccgcggcgcagtccgacaagcgcgcgatcatcttcttcgacgagatcgattcgatcgcctcctcgcgcgagaccgacacgaacggcgtcggcaagcgcctggtggcgcagctgctcacgttgatggacggtttcgagtccaagggcaatgtggtggtggtcgccgcgacgaaccgcatagaggacgtggatccggccctgctgcgcccggggcgtttcgattggcagattccgttcccgatgccgagcgagcatgaccgtctgcgtatcctgcaggtgcaggccgcatcgctgtcgtgcgagggcgagctgccgttgaccgacgtcgccgagcgcaccgagggctggagcggcgccgaagtgtgcgccatctggaccgaagccgcactggtggccgccaaggacaagcgtgccgcgatccgcgccggcgacctcatgaccgcattcgagcgcgtcgagcatcggcccgagttccgcgcacgccggcactaggtgcgagctcgattctcggctcctgcttgcggtaagggatggttcttgccctcgctggcggccgcaggccgtccttgattgcagggcccggagggctcccgcgtagcgggcgatgatgtggtcttgtgtttcgttggttttgcatccgttctgccgtttgtccaccctccggtgctgcgtgccacctcccgccagcgggaggggatgggtcttgtctgctggtctgattgggatgtggagtcttttgttccaaagtgtgagacaagtcgaggattttgtgccacaccacgtcgaaaacgccggttttgcgcgtggtgtggcacaggaccttgctgcggaatcggttttaaccggttacatgcgctgccgtggtacaagaggaatatcggcaatccttgaaaaatggccgattccgctgtccggtgcgaatcctcccgtatcgggcgtgtaccacaccacggtcaaaaacgtgtttttcgtcctggtgtggcagcgacttcgccgtcatggctgcacccgcacagcctcatccgcacagccgcacccgcataaccgtcaccgaccggcgggagagcgacgacctgatgcgctaccgatgcgcccgcaggaagtgcttgatgagtcgtaccaaggcgaatcccacgaatgagaatacggtgaataccagcatgaagtatccgatttgctccatgcagccccatgaaagctgccatccgccaatcgaggtgcagacgtcggccttcgcgcaaggaccgccttcgaacccgtggatcagagcgaacagcagcgggagtgagaccgctacgcatccgagagggaatttccaagtgcttttcctgaagcaggcagccgcgatattgatgataagcaatactggaggaacaaggaagttgatcatcagtgcagcggccatgaagccctcataatcgggctgaactatacaggccagaagcaggccgtaaaggacggctacgatcagcatgcaggcgaatcgtccgggattgccgcgtatccacgaaccggatttcgacagtatggaaaggctgttgttcgtcgtactcatggaatccctttctcgacattgagcaacgtatatccatgatacgggatggcgcccgtcagaggaagagccgcaaatacgaatgccccccgctagcggggggcattaccgatgaaggctggagcttactcgctggccttggagtagagcttgccgccctgggcgcggtacttttcacccatggcgtccataccggcaaggatctcctcggggcttaggacgttggcggacacgacggtgtcgtcggtgaccgggttcgccggggtctcgacgccctccgggatcttgccggtgacggcgtccgcgacaatctgctgctgggcggcctcgccgccgaacgccttgcggatgttctgcgagatggccatcgagcagaacttcgggccgcacatcgagcagaagtgcgccatcttggccggctcggcgggcagcgtgtcgtcgtggaaggcgatggcggtatccggatcgtagctcaggttgaactggtcgagccagcggaactcgaagcgggccttcgagatcgcgttgtcgcggtccattgcgtgcgggtggtgcttggcgatgtcggcggcgtggcaggcgatcttgtaggcgatcacgccctgcttgacgtcatccttgttcggcaggcccaggtgctccttgggcgtcacgtagcacagcatggcggtgccgtaacggccgatttcggtggcgccgatggcggaggtgatgtggtcgtagcccggcgcggtgtcggtcgtcagcggtcccagcgtgtagaacggggcgccgtggcacacggccttctccagctcgatgttcatgcgcaccgtgtcgaagggcacgtggcccggtccctcgatcatgacctgcacgtccttggcccacgcgcgctcggtgagctcgcccagggtcatcagctcgctcagctgggccgcgtcgttcgcgtcggccagcgagccggggcgcagaccatcgccgagcgagaacgccacgtcgtacttggcgaagatgtcgcacagttcgtcgaagtgcgtgtacaggaagctctcctgatggtgacgtaggcaccagtcggccatgatggaaccaccacgggagacgatgccggtgacgcggttggcggtcagcggcacgtagcgcagcagcacgccggcgtggatggtcatgtagtccacgccctgctcgcactgctcgatcacggtgtcgcggaacagctcccaagacagcttggaagcgtcatcctcgaccttttcgagcgcctggtacatcggcacggtgccgatcggcacgggggagttgcgcaggatccactcgcgggtggtgtggatgtcgttgccggtcgacagatccatcacggtgtcggcgccccacttggtggcccaggtgagcttctccacttcttcatcgatggaggaggtgacggccgaattgcccatgttggcgttgagcttggtgaggaaggcggatccgatgatcatcggctcggcttcggggtggttgatgttgcagggcatcacggcgcggccggcggccagctcggagcgcacgagctccacgtcgcagttctcgcgggcggcgacgtactgcatctccggggtgatgatgccgtgacgggcgtaccacatctgggtcaccgggtggtccttggcgcgcatcggctggtgcgtgcgtccacgccattccttggtggcgcggccgcgcttgatggcgcgcttgccgtcgtcctgcaggttgcggcggcggccctcgtagtcctcgatgtcgccgcggtcgcggatccagtcgaggcgcaggggcttcaggccctccttcgggtcgcacttggggccttcggtgttgtagtcgtggaacggggcgttcgggcccactccgggggtgtcggagagcttgatctcggtgtagggtacctcaaggtcgtaggagccgtactcgtaggagaacggcacagacttggtcttgcggatgtgcgccttgtcgcgctgcttggacccacgggcggcgatgtcgacgcgctgctgcttggcgagcttctgcgcgtccttggcgtccttggcgttggtgaacttcttttcggtggcctcggctccggcggcggcgctgccttcctgcgcggcctgcgtgtcggtggcgggggtgtgggtcacgatgcgcggggcgtatccgtggcgctcgtctgcgcgcacggccttccagccggagaccatctcgcgggtggcggcctcggggtcgtcggcgcccgcgatggcggagaccgcgaaccagccggcggccttcgtgccggccagcatggccatgtcagccgcggtcacgccgccgccgacgacgaccgggaactcgctggcggagcagatcgtgttgatctgcgcggcatccagggtcttgccggagccgtcgttgccgcccaccgaggcttccggcttggtggaggagacgtgcagaggtccggcgccgatgtagtcgatgcagccgtcgggcagctcattgatgagtcggaccagggactcggtctcagccgacagtcccacgatcgcttcgtcgcccagcagggcgcgggcctcgcgcggctccatatcgctctggccgatgtgcacgccgtcgatcttgatgcccttgcggcgggcctgccacaccacgtcggcgcggtcgtcgatcacgaaggccacggagtcggacttctcgttgtcctcgatgatctgcgcgatgtcgcgggctatctcggtcagctcggaggcgtcggcgcccttggctcgcaattgaatgaaggtggcgccgccatgcaaggcctgatcgatcacctcggtcagcggccggtccttgcagtcctgggggccgaccacgaagtacgcgctcaggtcgaacgaatcgcgcatggacgcgaatgggtattcattgctcatctgttgttcctttaattgtgttattggaagaatatgatgcctattggaagaatatgatgccggcgccactcatcgggagcaccgggagggggcggctatcgcatgtcgatcgcgcggtctgccacctcctcggcggtaacgttccacagcgcgtccagcagcgccacctggaatgaaccggggccgttgcttcgtttctcggctatctcgccggccgtgttgtacagcgatgtggcggcgagcgcggcgatcagcggctgcgcgacggcgagatacacggcggtgacgccgccgagcgagcatccggcgccggtgattttcgtcatcatggcgctgccacccgccagccggtacacgtgttcgccgtcggtcaccatgtccgtcgcaccggagacggccaccgccgccgtgccgttggcgccgtgcctcgccatgaaccgtgcgagccgctgcgccggtgcgatggcggattccacgtcgtcgacggattccacgccggcgggcttggatgcggtagcggtcgcggattcctcgttcagcccccacatggcgtcgagcgcgatgatctccgaggcgttggctcggatcacggtcggcggatagcgcttgaatgactgcaatatggcggttctggtctctccaatgccggcggcgacggggtcgagcacccagggatggccggtgttgtggaacgccctcgccacttgcggcagcgcgtccttgtagaacggcagcagggtgccgacgttgatgtagtcggcgccgctgatcgtggcggtgtcgatgatgtcgtccggcaggaagctcatggccgccgcgccgccggcggcgagctgcgcgttggcgacaaggttgatggtgacgaaattggtgaaggactgtgctagcggcgtagtctcgcgtaccgtgcgcaccgcgtccgctatctgctcgcgcagtgatggctgtgtttgcggcgatatccgcgtgttcggcgattcctcgctcataatcattgctccctacgatggtcttgaccaacaggttcaaagggtcaggcgtgtggcctttctcaactcgcgtactgctgcgggttcccctgcattgtgcccttcaacgctatggcccaatatggacattgtgtcttgcgtttcttggaggtacgtggtaatggcgccgtttcgttgccggcatgcgttgcgttgcgatttttccggccctgtatggggggcacaggattggcgatggcgacacgccgtttttgttaatggtatttacatgaaatacaggtaatgagatatcattctcatgatcaccgtgtggatatcgcattggtgcgtatacactaacagcaacagagcggcgcggcaggcgctcgtggattcaatgaagaaggaacgtttatggcagttcgcagacttggtggccgcatcgtggctttcgccgccacagtggccttgtcaataccgttagggttgttaacaaattcagcgtgggcggtcgaggacgccacccgatccgactccaccacgcagatgagctccacgccggaggtggtctactccagcgccgtggattccaagcagaatcgcacctcggatttcgacgccaactggaagttcatgctgtccgattccgtgcaggcgcaggatccggcgttcgacgattcggcctggcagcaggtcgacctgccgcatgactacagcatcacgcagaagtactcgcagagtaatgaggccgaaagcgcgtacctccccggcggcaccggctggtaccgcaagtccttcaccatcgaccgggacctcgccggcaagcgcatcgccatcaacttcgacggcgtgtacatgaacgccactgtctggttcaacggcgtcaagctcggcacccatccgtacggctactcgccgttctccttcgacctgaccggcaacgccaagttcggtggggagaacaccatcgtcgtcaaggtcgagaacagactgccgtccagccgctggtactccggctccggcatctaccgcgacgtcaccctcaccgtcaccgacggcgtgcacgtcggcaataacggcgtggccatcaagaccccgagcctcgccacccaaaacggcggcaacgtgacgatgaacctcaccaccaaggtcgccaacgacaccgaggccgcggcgaacatcaccctcaagcagaccgtgttccccaagggaggcaagaccgacgccgccatcggcaccgtcaccaccgcatccaagtccatcgcggccggtgccagcgcggacgtgacctccacgatcaccgccgcctcgcccaagctgtggagcatcaagaacccgaacctgtacaccgtgcgcaccgaagtgctcaacggcggcaaggtgctcgacacttacgacaccgaatatggcttccgctggaccggcttcgatgcgaccagcggtttctcgctcaacggcgagaaagtcaagctcaagggcgtctcaatgcatcatgaccagggatcgcttggtgcggtcgccaaccgccgcgccatcgagcgccaggtcgagattctccagaagatgggcgtcaactcgatccgcaccacgcacaaccccgcagccaaggcgctgattgacgtctgcaacgagaagggcgtcctcgtggtcgaagaggtcttcgacatgtggaaccggtcgaagaacggcaacaccgaggattacggcaagtggttcggccaggccatcgccggtgacaacgccgtcctgggtggcgacaaggacgagacctgggccaagttcgatctgaccagcaccatcaaccgcgacaggaacgccccgtccgtcatcatgtggtcgctcggcaacgagatgatggaaggcatcagcggcagcgtctcgggcttcccggctacctccgccaagctggtcgcatggacgaaggccgcggacagcacccgcccgatgacccacggcgacaacaagatcaaggccaactggaacgagtcgaacacgatgggcgacaacctgaccgccaacggcggcgtggtcggcaccaactactccaacggcgcgaactacgacaagatccgcacggaccacccctcatgggccatctacggttccgagacggcgtccgccatcaacagccgaggcatctacaaccgcaccactggcggcgcccagtcaagcgacaagcagctgaccagctatgacaattccgcagtcggctggggtgccgttgccagctccgcctggtacgacgtggtccagcgcgatttcgtcgccggcacatacgtgtggactggcttcgactatctcggcgaacccaccccgtggaacggcaccggctccggcgccgtgggctcctggccgtcgccgaagaactcgtacttcggcatcgtcgacaccgcaggcttcccgaaggacacctattacttctatcagagccagtggaacgacgacgtgcacacgctgcacatcctccccgcatggaacgagaacgtcgtcgccaagggctccggcaacaacgtgccggtcgtcgtctacaccgacgcggccaaggtcaagctgtacttcacaccgaagggcagtaccgaaaagcgactgatcggagagaagtccttcaccaagaagaccaccgcggccggatacacctatcaggtctatgagggcaccgacaaggactccaccgcccacaagaacatgtacctgacctggaacgtgccgtgggccgagggcaccatctccgccgaagcatacgacgagaacaacaggctgatccccgaggggtccaccgagggcaacgcgtcggtgaccaccaccggcaaggccgcgaagcttaaagccgatgccgaccgcaagacgatcaccgcggacggcaaggacctgtcgtacatcgaggtcgacgtgaccgacgccaacggccatatcgtccccgatgccgccaaccgcgtcaccttcgacgtcaagggcgccggcaaactggtcggcgtcgacaacggcagctcgccggatcacgactcctatcaggccgacaaccgcaaggcgttcagcggcaaggtgctcgccatcgtccagtccaccaaggaggcgggcgagatcaccgtcaccgccaaggccgacggtctgcaatcatccacagtgaagatcgccaccaccgccgtccccggcaccagcaccgagaagacggtccgcagcttctactactcgcgcaactactacgtcaagaccggcaacaagccgattctgccgagtgatgtcgaggtgcgctactccgacggcacgtcggaccgtcagaacgtcacatgggacgcagtcagcgacgaccagatcgccaaggccggttcgttcagcgtggccggcacggtcgccgggcagaagatctccgtgcgcgtgacgatgatcgacgagatcggtgcgctgctcaactattcggccagcacaccggtcggcacgcccgccgtgctgcctggctcgcgtccggccgtgctgcccgacggcaccgtgaccagcgcgaacttcgccgtccgctggaccaagcccgccgacaccgtgtacaacacggccggcaccgtcaaggtccccggcaccgccaccgtcttcggcaaggagttcaaggtcaccgcgacgattcgcgtgcagcggtcgcaggtcaccatcggcagcagcgtctccggcaatgcgctgcgcctgactcagaacatccccgccgacaagcagtccgacacgctggacgccatcaaggacggctccacgaccgtcgacgccaataccggcggcggcgcgaacccgtcagcatggaccaactgggcgtactcgaaggccggccacaacaccgccgagatcaccttcgagtacgcgaccgagcagcagctcggccagattgtcatgtacttcttccgcgacagcaacgcggtgaggttccccgacgccggcaagacgaagatccagatctccgcggacggcaagaactggacggatctcgctgccacggagaccatcgcggcccaggagtcgtccgaccgagtcaagccgtacacctatgacttcgctccggtgggagccacgttcgtcaaggtcacggtcaccaacgccgacaccacaacccccagcggcgtggtctgcgccggcctgaccgagatcgagctgaagaccgcgaccagcaagttcgtcacgaacacgtccgccgcgctctcgtcgctgacagtgaacggcacgaaggtctccgactccgtgctcgccgccggctcctacaacacgcccgcgatcatcgcggacgtcaaagccgagggcgaaggcaacgccagcgtcaccgtgctgcccgcgcacgacaacgtgatccgcgtgatcaccgagtccgaggaccacgtcacgcgcaagaccttcaccatcaacctgggcacggagcaggaattccccgcagactccgatgaacgcgactacccggccgccgacatgacggtcaccgtgggcagcgaacagacgtccggcaccgcgaccgaaggcccgaagaaattcgcggtcgacggcaacaccagcacgtactggcattccaactggacgcccaccaccgtgaacgacctgtggatcgccttcgagctccagaaacccaccaagctcgacgcgctgcgctacctgccgcgccccgcgggcagcaagaacggctccgtcaccgaatacaaggttcaggtcagcgatgacggcaccaactggaccgacgcgggctccggcacatggaccaccgattacggctggaagctcgccgagttcaatcagccggtgaccaccaagcacgtgcggctcaaggccgtccacacctatgcggattccggcaacgacaagttcatgtccgcctccgaaatccgcctgcgcaaggccgtcgacaccaccgacatcagcggcgcgaccgtgaccgtgcccgccaagctgaccgtcgaccgggtggacgccgaccatcccgccaccttcgccacgaaggacgtgacggtgacgttgggcgacgccacgctgcgctacggcgtggactacctgctcgactacgcgggcaacaccgccgtcggcaaggccacggtgaccgtgcgcggcatcgacaagtactccggcaccgtcgccaagacgttcaccatcgaactgaagaacgccccggcgccggaaccgacgctgacctcggtgagcgtcaagaccaagccttccaagctgacctatgtggtcggcgacgcgttcgacccggcaggactggtgctgcagctcaactatgacgacgacagcaccggcaccgtgacctggaacacgcagacggccggcgacttcacgttcaagcctgcgctcgacgcgaagctcaaggtcaccgacaagaccgtcaccgtcacctaccagggcaagtccgcggtcatcgacatcaccgtctcgcagcccgccccgaccgtcagcaagacggatctggacaaggccatcaaggcgatcgaggccaagaacccggattcgtccaagtacacggccgactcgtggaagaccttcgcggacgccatggcgcatgccaaggccgtcatcgcggatgattccgccacccagcaggacgtcgataacgcgctcaaggcgctgaccgacgcctacgccgggctgaccgagaagacgcccgaacccgcccccgtcagcaagtccgagctggacaagaagatcaaggcgatcgaggccgagaagctggacgggtcgaagtacacggccgactcgtggaaggcgttcgagaccgccctggcgcatgccaaggccgtcatcggcaacgccaactccacgcagttcgacatcgacaacgcgctgtcgatgctcaacgacgcccgcgccgcgctcaaggagaagcccggccgcatcatcgccatcatcgatggcagcgcactgagcaagaccggcgcatccgtcgccatcatcgcctccgtcgcggccgcgatgctggcggtcggtgccggcgtcatggcgttgcgccgcaagcgctcctgacccccacgagactctcgcgagtctccccgggtgccccgtcgacgatcatgccggcggggcacccgcatatccgcaggttggatgctgccgaacaaggcggcatgctgtcaccgtctgccgttagactcgtgcgagcatactaagtccccaaaccgttcaaaccagaaggtgcattgtggctgtttctaaactcgatgaagtcgtatccctcgccaagcggcgcggattcgtgttccccgccggcgaaatctatggcggcacccgttccgcatgggattacggccccctcggcgtcgccctgaaagacaatatcaagcgtgaatggtggcgctccatggtcgtcacccgcggcgacgtggtgggcgtggacacatccatcatcctgccgccggccgtatgggtcgcttcgggtcacgtctcagtgttcaacgatccgctgatcgaatgcctcaagtgccacaagcgccagcgttccgacaagctggaggagtcctacgccgaaaagcacggcgacaagctgcccgagaacggtctcaaggacatcgtctgccccgagtgcggcacccgcggcgagtggaccgaaccgcgtgacttcaacatgatgctgcgcacccacctcgggccggtcgaggacgagaacagcctgcactacctgcgccccgagaccgcgcagggcatcttcgtcgacttcaagaacgtgatgacctcctcgcgttccaagccgccgttcggcatcgccaacatgggcaagtccttccgcaacgagatcacgcccggcaacttcatcttccgcacccgtgagttcgagcagatggagatggagttcttcgtggtgcccggcaccgacgaggaatggcaccagtactggatcgacacccgcacccgctggtacaccgacctgggcatcaaccccgagaacctgcgtcactacgagcacccgaaggagaagctctcccactactcgaagcgcacggtcgacatcgaatacaagttcggtttccagggctccgactggggtgagcttgaaggcatcgccaaccgcaccgactacgacctgagcgcgcattccaagcactccggcgaggatctgagctacttcaaccaggccgccggcgagaagttcgtgccgtacgtcatcgagccggccgccggcctgacccgttccctgatggcgttcctcgttgacgcctacgacgtcgacgaggcgccgaacaccaagggcggcgtcgacaagcgcaccgtgctgcgtctcgacccgcgtcttgctccggtcaaggccgccgtgctgccgctgagcaagaagcccgagctgcagtccatcgcccacgatctggccgccgacctgcgtcagcacgagtggatgatcgactacgacgaggccggtgccatcggccgccgttaccgtcgtgaggacgagatcggaacgccgctgtgcatcaccgtcgatttcgacacgatcgacgaccaggccgtcaccatccgcgaacgtgacacgatgcagcaggagcgcgtcgcgctcgacaaggtcgccgactacgtggccgcccgcgtgtccgagaagcgcgtgcgctaccccgagggccccgtcagcatcaccggcaccaaggccgccgacggcggcaccgacgtcgccaaggagaccggcgtggacgagtccgccccggtcaaggtcgccgaggccggtggcctgtactgatcgatacccggcccgactacaccgggccgggtgctgaacatcattcggacagcccccttttcaccaagggggctcttgtacattcaagacatgtatggcatgagccgtgccgattcgtgggggagagccgtgacagacaccgttgaacagaccatcgccgtcgacgcgcatgagaccgacgtgctcgacccgcgcaccgacgcaccggccgggaaggaaccggtcacgatggcaccagtcgatctcgggccgatccacgtgccgacgccggtggtgctctccccgatggcgggcgtcacgaactggccgttccgcgtgctgtgtgaggaatacggcccggacggcctgtacgtggccgagatgattacggcgcgcgcgttggtcgcccgcaatccgaaggcgctgcgcctgtgccggttcgcgccgagcgagcgcatccggtcgctgcagctgtatggcgtgaacccggccatcgtcgagcaggccgcgcgcatcgtcgtcgatgaggacatggccgaccatgtggacctgaacttcggctgcccggttcccaaggtcacccgtcgtggcggcgggtccgcgctgccgtggaagaccgacctgttccgcgagatcattcagcgcgtggtgaaggtgtgctcgacggcgaacatccccgttaccgccaagatccgcgtcggcatcgatcacagccatgagacgttcatggaagccggccacatcgcgcaggaggaggggtgcgcggccgtcacgctgcacgcccgcaccacggcggaatactatggcggccattcggactggagccgcataggcgaactggtcggcgcgctggacatcccggtgttcggcaacggcgacatctggggcgccgacgacgccctggagatggtccgcgagacgggatgcgccggggtcgccatcgggcgcggatgccagggccggccgtggctgttcgccgatatcaggaacgccttcgcgggcagcgacgagcgcgtcaaccctacgctgggggccgtatgcgacgtgatcatgcgccacgcccggctgctcgtcgagttctatgacggtgacgagcgcatggccgtgcacgacctgcgcaagcacatcgcctggtatctcaagggattccccgtcggagggacgacgcgcagggcgttcatggagtgcgagaacctcgccgacgtggagcgcgagacctcgcgtctcgatcccgccatcaccttccccgaacgggtgaaggacaagcctcgcggccgtgttcgctttgcaaaaaaagtgcatctgccgtacggttggctcgactcgcgggtcaccacgcacgaggagcgcgagacgctgttcggcgacgatccgatggacgccggatactgagacggcatccgggtcatgggctgaatgcggccatggtgtgtcgttttgtgcaaatgagatggaaaaacgttgatacacgccgagaaaatagctttataatcaatggttctgcgatagagttatgcgtaaccgtgagtgacaggagacaatggtgagcgagattgcccagactgacaatttcaacgacaggaccaacatcaaagtcgtcggtgtcggtggagccggcggtaatgccgtcaaccgcatgatcgccgaaggcctgcagaacgtgcagttcgtggccatcaacaccgatgccaaggatttgctgcgctccgacgccgatgtgaagatctcgttgaatgacgcttcaagccgtggattgggtgccggtgccgatcccgagcggggcagcaaggccgcgcaggatcaccagtccgacatcgaggaggcgctcaagggcgccgacatggtcttcgtgacctgtggcgagggcggcggcaccggcaccggcgcgagccccatcgtcgcccgcgcggcgcatcagcagggggcgctgaccatcgccgtggtcacccggccgttcacgttcgagggaccgcagcgttccgcctccgccgatctgggcatcgagaacctgcgcaaggaggtcgacgccctgatcgtcatccccaacgaccggctgcttgagctgtccgaccgcacgatcggcatcgtcgacgccttcaagaccgccgattcggcgctgctcgccggtgtgcagggcatcaccgacctgatcacgatgaactcgtacatccatgtcgacttctccgatgtcaccgccatccttcgcggcgccggcaccgcgctgttcggcatcggctccgcgcggggcgaggaccgcgccacgcaggccgccgagatcgccatcagctcgccgctgctggaatccagcgtcgaaggggctcacggagccctcatcaacatcgccggcccgaccgacctcaagctgcaggaggcctctgcggccaccgagctggtgcgcaaggccatccaccccgaagcccagatcatctggggtctcgcgctcgacgacgcctacggcgacgaggtccgcgtcacggtcatcgcggccggtttcgacgccgattccaagaacaccaacgtaccctcgatgaagggcgccacgaccgccgcatccatcccggcttcccacgccacggaccccgtcacgccgacgcacgcgcacgaccagcagcagccggtcgcgccgagcatccccgtgcgcacgcagccatccgcgaacacgcccatgaccaccaccaatccggcggcgcgtcaggtgccggatttcgcgctgcgcaagggcggccccgcttcgatgccgatcgatgacgagacctccgagcacgatatcgtctcctccggtgacctgggcgacctcgatatccctgattttctgcgctgagccgaaaggaactgaacagtcatggctgggtttatgaagaacgcgatgcagtatctgggcatggcggatgttgccgaagacgacgagccgatggacatccaggatgaggatcccggattcgacgacgatcattcggtcactccggtgtcccaggctgcgccatcgtcgccgacatccgcgcccagccgtgagtcgaatccgttccagggtcgcgtgagccgcatcaccacgattcatccgaagtcctacgaggacgcgcagctggtggggcgtgctatccgcgacggcgtgcccgtcgtgctcaacctgaccggtgtctctgaggccgtggcgtaccgcatcgtggacttttccgcgggcgtcgtcttcggcgtgcgcgggtccatcgagcgtgtcactccacgcgtgttcctgctcagcccagcccaggtgaacatcaaggtggaggagccgcaggcgccgtcctcggcgcacgacctgttcgccgactgatctgcgggcggtcggccggattggcggctgtagacgattcgtcgtcatgacagcggcggcggtaatgcccagttgacgttcagctgacggcaatgaagctgtatgccgttttgataggctggaaggcatggtgttcacaatagtgcgtctggtgattgactggattatcgacgcttatatcacggtgctgttcgtccgtatgatcctggattgggtgtcggtgcttgcgccgcgttggtatcccaagggcgtcgtcgcatcgctgatcaatgtcgtctaccagctcaccgagccgccgttgcgctggctgcgacgctacatccggcccataccgatggggcctatagcgatggacgtcagcttcatcgtgctgtacaccgcacttgtcgccttgagaatattggtgtaaatcgcgccgtaatcacgcatacggtgagagttctttcagggttcgtgctagcatcggaaggtgataccaacacagcgaggcatcgtgcccaaagcgaggtgtaagttttatggctcttttgacgcctaaagatatacgggagcataccttccagaccgtgcgtttcaaggaaggctatgatgtcgacgaggttgacgattttctcgatcaggtgacggaaaccgtcgaggcgcttggcaagcaggccgttgcaagtggccaggcgacgcagtcccttcctcccgacgtcgccaagctcaactccaagatttccgagttgactgcgcaggtacagtcactgcagagcgaaaacgagcagctcaagtccgcggcgcccgtcgccagcaaggacgatcaggcggctcaggtggctgcggcgaaactcaccgaagccgaggagagcaaccgcgcgctgtcccagcagaacgagcagctcaaggatcaggtggatcgcctcagcggccagatcgaccagctgaccgcgcaggccgcccaggcctccggcaaggccgatgtcgccgcgcagctcgccgcggtgcagaacgagcgcgaccagtaccgcgtcagcgccagggacatgagcggacgtctgcaggaagcgcagcagcaggccgcctcctaccagcagcagctcaacgatgccaagaagcacctcgatgcgttgcagcagcaggccgcgcaggcctccgatctggctcgtcagctggaggagtccaagcagcgcgagaaccagctgcgcgagcaggtcgccaaggtcgagccgagcacggagaccggcagcctgcagaagatcgctggtgccgccgccgctgccagcagcgagcccgagcgcgccaccgccatgctgacgctggccatgcagctgcacgaccagtacgtcgacaagggcaaggccaaggcgaaggaaatcaccgaggccagccagaacaagtacaacgagctggtcaccaaggccaacgactactcgtcccgtacccgtaccgaggccgatgagtacaacaagcaggttcattccgatgccgacgcgtactcggagcgcactcgttccgacgccgacgcctactcggtgaagacccgtcaggatgccgacacgtaccgcgagaacacgcagcagcaggccgacaactatgaggacgaggtgcgtcgtcgcgccggcgagtacgacagcaagacccgctccaacgccgatgagtatgcgcagcaggtgcgtgacaagctcaccacccagtccaaggtcatcgagggcaacattcagggcctcaagcagttcgaagccgaataccgtgcgcgtctgaccgagttcctcggccagctgtctcgtcaggtgtccgatacgaacaactacagccagatcggcaagcaggcggaatagtcgatgaaggatatccaaggacggctgcgtgttcgcgtagccgtctttgcatgtgtggcggccgtggcgctgggcatcgatcagctcaccaagatgtgggcgcagcaggcgttgggcgacgggcgtacagtgccgctgatcccgggcctgctttcgttgacgctggttcataatccgggtgcatcgctcggtctcggatcgggaagcacatggctgatttcgctgctcgccgtggtggcgtgcgtggtgatggcggtgctggcggcacgcacgatatcgatgcgctggacggtgatgttcgcgttcgcgttcgccggagcgttcggcaatctgatcgatcgcgtggcctatgcggacgggttcctcaatggcaaggtcgttgatttcctgaattatggttggtctgtgggcaatgtcgccgatatctatctggtgatggccggcatcggcgtcgtggtgctgattgtgctggatgtgccgttcagtcgcaaggacctcgatcggattgagcatctgggggaggatgccggtgacgtggcgcgtgacggggagtcagacggcacggcggacgaatcgcaggactcgtcagcgatggtgcaggatgcatcgtccggctcatcccggacggaggtgaccgtttcgagccgtcagcctgatgactcggagaggagcgcttcatgagccgtctcgttccggcgcccgacgcattggtggggtcacgattcgacgtggcggtttccaagatgctgggcatctcgcgtgccaaggcggcggatcttatcgaatccggccaagcccgcgtgctgaatcgtgcgatcgccaagtcgggcacgctgctgtatggggagaccgtcgaattcgacatcgccgaagaacggcatgagccggaaccggtgtgtctcgacatggccatcgtgtatgaggatgacgatgtcgtcgtggtcgacaagcccgtgggcgtcgctgcacatgcttcggccggatggacaggccccaccgtattgggcagcctgctcaaacgcggcgtgcgcatcacctcatacggagctcccgggcggcagggcatcgtgtcgcggttggatgtgggcacgtccggcctgatgctggtgtgcaagtcagagctggcgtacaaggagatgcggcggcagttctccgagcatgaggtggtcaagacctatcatgcgatggtccagggcaacctcaaggaggacaaggccaccatcgaagcgcccatcggccgcgccaaggtgtcggacttccgcttctgcgtcacgccgtcgggcaagccggcggtcacgcattgggacgtgctggaccgattcggcgaggcgacgctggtttcggtgaatctcgaaaccggacgcacgcatcagattcgcgtgcatttctcttcgatcgggcatcctctggtcggagacccgatgtatggggccaatccggtgctggccggggagctcggcctggaccggcagtggttgcatgcgatgaagctggagtttcgccacccccgcacccatctctggacgtcggtcgaatcccactacccggccgatcttgcccatgcactggaacttatgcgcgccaggcatgcctcaactggtctggaagccgccgactagcgtacccaatcggcctgtcgcgtagcgctgtcatcctactgtcgccccccgctggcgggggctgtcgcgtagcgactgggggtggtccaacgccaattcgcgcccccgctgttcttacttatcgcgtttcttccatgcaacgacggaagtgaccacgccggccgccagcagcggtacgcaggccaacgccgcgacgccttcaaccagcagcaggatggcgtctgcaggattgtagacgccgcgattgagatacatataacatgcgattgcggccagtgccgatactgtgccggccgccagcagcgcaaagccgagcgtgcgcaaggcattatgcgatgaggagcaatattgggccgatgtcgcagtcggcatggtcggcgcggactgcacggtgaccggcggcgaatcctcatagtgtggctgatttgcggacgtcattgttcctcctggtggttcgttgccgcgaattgtctggcgacggcggatcatccttgatggcaatctatgcgacggagacactctttgtccagcggaacggacaatgtggtcgaaggctgccgagttatccacattttgggcgtgtcgtgccggattcgattcagctttcgcgagttacatgtggcattttcgcagtgtttactgatggtcgtcattcgctgccatacatgtccctcctgtacaatgaccatgtcatgcatgatgagacaaggggtgagcatgtatacctcgttggacaggttccgcatcaagccgggcaaagaggatttggcccgcgaatggttccgatatctgaacgatcacttggccgaagcgaatgcgacgatgccggctgagggcgcgcatatcgagtcatggttcctgcacgaggaatcggacggactgtacggatacgtgtacgtgatctacgacgacaatgataaggctgtcgaagtgttcaaggagagtgagaatccgttggacatcaagcacaacgagtacatgaacgcctgcatcgactaccacgactacgccgagatgaagcctgccgtggcgctgggcgactactccgtattccggagatgattggtcgacggttcgtcgacgccgttgtgtttgcagactcgtttgtacaacttatgcatttcggtcaaatgcataagttgtacaaacgatttccctagagaccctacttgccttgctgcgtttcgttggaattccagcgttttcgggaatacccgtgactcgcggcaacgggtatgtgtgctgtttcccgcgattatgcgggacaacgtccgcattatggcatttcgcgggcgttgtacacgcggcattgcactcgggtcggaaacgcgcggagcaagttcttccgcctcgccgccggggcggaagaaccatatgcactgaaacgcgtcgcccgaggaataacgcagaggacgctccgccagcgcacaatcagtttttgtgcagtttggcgttgagctcaatccccgtcttccggtagcgggcctcaatgcggccgttgacggagttgcggatgaagaggatgttgtctttgccgctcagatcggtgcccttgacgacgtccagcggttcgccggcggcggctttggccttgtcccagacggtgatcttggtaccggcggtgacgtacaggcctgcttcgacgacgcagttgtcgccgagcgagatgccgatgccggcgttggcgccgagcagggagtgctcgccgatggagttgcggagcttgccgccgccggacagggtgcccatgatggaggcgccgccgccgatgtcggagccgttgccgacgacgacgccttgcgagacacggccttcgaccattgagacgcccaaagttcccgcgttgaagttgacgaagccggcgtgcatgacggtggtgccttcggacaggtgggcgccgagacgcacgcggtcggcgtcgccgatgcgcacgccggaggggaccacgtagtcgatcatgcgtgggaacttgtcgattgacagcacgttgacggtggcggcgggagcggcggccggaagcccggcggaggcggcgaaggagcgcgcggcgctggtggcggccgcttcgacgtcgagcttgcgggcgttgaagtcttcgaccgcgaacgggccgtaattggtccagaccacgttcgtgagcttggcgaagatgccgtcgaggttgagggtgttcggctgggcgaggcgcatggagagcaggtgcaggcgcaggtaggcgtcggccgcatccgcgatcgggtcgtcaagggagcttacggtgaacaccggttcgcggcgcacgccacgggcgtcggcctgcggctgcgccagcgccccgaactcgtggttggggcggttcgcgccttcgggcacggcgccgagcgtcagttgcggataccagacgtcgagtgtgttcccggctgcatcgatgctggccagtccccagccccatgcggtgcgttcgttcgtcatgcttgtctccttggtggatgaacggtagatgcttctatattatgggcagatgggcacgtatgaggctgccgttccgaatcattgtggcgcggtttcgtcacgggagaaaatctagcggggcggctacgatgaaaagctatgagtgactacaggaccgaacgggagcagcgtgagcgccgccgccgcatcatcatgcgtgcggtgtgcgtcgtcattgccgtggccatgctcggcagcctagtcattcccgcggtgtatgcgggtctttgacgcgatcattggcgtcctgccgtgacgcgaggtgcttgagatttcgcatatggtcggcagcgtcgtcacacaatcgattcgttcacaagttcaatgattatggtggtattcgatggcagaatttgatttttcacaggcaatcggcgaggcacggtcgaagtatgagtccattgcgaaggcgttggacatcgaacggctgaagtcgcagatcgcgacgttggagaccgaggccgctaaacctggtctgtgggatgatcctgagaacgcgcagaaggtgaccagccgcctgtccgcggctcaggcgcagctgaagcgcctgaacgaggcgaaccgtcgcatcgaggatgtcgagacgctggtggagctcgctcaggaggaggctgacgccgattctctgagcgaggctcagtccgagatcggctccatcgcccaggagctggatgacatggagatccagacgctgctggacggcgaatatgacgagcgttccgcggtcgtgacgatccgctccggcgcgggtggcgtggacgccgccgatttcgcccagatgctgttgcgcatgtacctgcgctactgcgagcgcaacgggttcaaggccaaggtgatggatacgtcgtacgccgaggaagcgggcatcaagtcggccacgttccaggtggatgcgccgtatgcgtatggccgcctgagcgtggagggcggcacgcaccgtctggtgcgcatcagcccgttcgacaaccagggccgtcgacagacgagtttcgccgccgtcgaggtggtgccgctcgtcgaggcgaccgatcacatcgacattccggacaccgatatccgcgtggatacgtactgctcgtccggccccggcggccagggcgtgaacaccacgtattccgcggtgcgcatcacccaccttcccaccggcatcgtggtgacgatgcaggacgagcgctcgcagatccagaaccgcgccgccgcgatggccgtgctgcagtcccgactgctggtgctgcgccacgaggaggaagcgaagaagaagaaggagctcgcgggcgacatcaaggccagctggggtgaccagatgcgttcgtacgtgcttcacccgtaccagatggtcaaggatctgcgcaccggttgcgagaccagccagacccaggccgtgttcgacggcgatatcgatgcgttcatcgaagccggtatccgctggcgtcacgagcagcgtcgccaggcggccgaagaggaagagtaaaccgtgacttggctcccggctccgggggcgagtgaggagacgatatggcactcatcgcattggatcatgtgagcaaggtgtatcccaagggtacgaggccggcgttggatgatgtcaacctcgacatcgaacgtggcgatttcgtgtttctggtcggtgcttccggttctggcaagacgacgctgctgagcctgctgctgcgcgaggaggaggccacggacggcgagattcgagtggccggcaatgatcttcgccgtctgacgaaccgtcaggtgccgcagtatcgtcgttccatcggattcgtgttccaggattacaagctgctggcgaacaagaccgtgtggcagaatgtggcgttcgcgcttgaggtgatcggcacgcgccggtccgccatcaagtcgctggtgccgcaggtgctgcagaccgtgggattgaccggtaaggagaacaattacccgcatgagctgtccggcggtgagcagcagcgtgtggccatcgcccgcgcgtatgtgaaccatccgcagatcctgctggccgatgagcccaccggaaacctcgatccgacgacgtcgctgggcatcatggaggtgctggacgccatcaaccgcaccggcacgacgatcgtgatggccacgcacaacgaggagatcgtcaactcgatgcgcaagcgcgtcatcgagctgcataccggcaagatcgtgcgcgacgaggcccagggctcgtatgattccgccgagttcttccccgacagcgatgtcgcgtccaaggcgcatgaggcgatcagcgggcagtcggatgattctcgtttccgccctgattccggctcgttcgacgcacaggtcaccactatcgaggcccgtggcgaggagggtgcagtcgagggtatcgaagtggtcgccaaggcggtcagcggcaatatccggaacgaaggcatcgcccggttggcgagctccgtgcattcggggcgtaccggccgctacggtgaggcgttccagtcggtggaggacacgctgacctggggcaagggcctgtcgcttgagcagattgccgcgcaggaggagcagaaggcccgcgccgagcagggcggggatgaacactccgatgccgcggctcagtcgagcggccgggcgacggctcggggtgatgcccggtccgcgcagccggaggacgccgcccagccggaacggcacgagccgccggaaccgccgcattcggcggatgatgccgcaccgcatggtcagccggagacggagcatcctcaggatgaatccacatcccaaagcgaacaggccggttcggcggcggagccgggctcctcgtccgatgaggggggcgagacgaagccgaggcgcgcgcacaagctgccgccggcgccgccggcccaaccggggcatcgcgacaggcatgccggaaaggccggtagcgctgatgatgccgacggtgctcgcaacgaggaggacaatcgatgagaatgcgttttatcctgtctgaaacctggaccagcctgcggcgcaacgtgtccatgatcatctcggtcatgctcgtcacgttcatctccttcgtgttcatcggtgcgtccgtgctgatacaggcgcagatcaccaaggcgaagggcgactggtacgacaaggtcgaggtcgtggtgtggctgtgcccggacggcaccagccagtcggcgtcctgctcgaccggcaaggcgccgacccagcaggagatcgtggatcttgaggacgtgatcaacaacgagctcggcagtgacgtgtcaaagatcacgtacatgagccgcgaggagttcttcaagaacacgttcctcaagcagtacccgaacggcgtgtacgagggacgtaccctcaccgcctccgatatgcaggattcgctgcgtctcaagctcaaggacccgaccaaataccaggtggtgtcggaggtgctgaccgggcgcacgggcgtggaggcggttgtcgaccagcggcagatcttcgacccggtgttctcggtgttgaaccgggccaccgtggtcaccgtcgtgctggccggtgtcatggtggtcgtcgccatcatgctgaccgcgacgacgattcgcatgagcgccgcctcccggaagaacgagacagagatcatgcgtctggtgggtgcttcgaactggacgattcgattgccgttcatcctggagggcgtggtggcgtccctgctgggatcgctgctggcggtcggcgcgctgagcggcatcgtcaaggtgttcgtcaccgattggttggcgaccagcgtgcagtggatgccgttcatcacgcagacgacggtgtggctgaccgcccccgtgctggtggtgggggccatgctgctgtcggcggttgcgtccgcggtatcgctgcgacgctatctcaaggtgtgacttgccgccgcgtgacgtccgggatgcgcgaagtgtgagatgaattatttcgctgccggatgacacgcggcgcatttatccagtttaattcgttacaatacgttcaaatacggcattaatggaagggcgacaacaatggtgaagatggcgaaacgtgggggtacgttcaccgctttggcgcttgccgccgcaatggccctgggggcgggatcggtggccgtggtcgccccgcccgagcaggccgctgcggttacggagtatgaataccagcagaaggtatcgaaccacaacagcctcaagaggcagctggccggcgtcgattccaaacttgccgatctcatcatctcgttgaatgacctgaccgagaaccagattcctgccgcgcagaaggccgtacaggagtctcagcagaaggccgaacaggcgaagagcctcgcagaggcgactgcggcgcggcttgaggcggcgaagaacgaccggacctcgcttgaggagaagatcaagcagaccggtgaggattacgatgacgccaaggatgcggtcgctcagctcgcgcgcgaaagcttccacggctcggacgcctccaccctgatggacgtggtgaccaatgccaccacgaccgaggacttcgtcaacaagatgcagtcggatgccgctgtcacgcgcagtgaggcgaatgccgccgacgccgcggccaccagcctcagcacgtcgatgaaccgcaaggaacgtctcacggccatcgaggacgagatcacccagctcaagggccaggcggacagccaggcggccagcgcgcagcaggccgctgaggatgcggcgtccaagcagagtgagctggaggccttgcgcaagaagagcgacgaggaacgcgcccagctggaagcgcagaagaagagcctgagcaccaaggaagcgcaggaggccgccgaactggtgtcgatgaaggccgagatcgattcgtggagcgtgcagaacaacaccggttcggcgaatgccggcaccggcggacagcagcagatcaagcccggcaccggcagcgggtcgggcagcggctccggttccggtgccggctccagcaagcccggttccggttccggcaagcccggctccggttccggtaatggttccggttcgggcggatcccagcccggcggatcgggacaggccaacggcatgaactacacggtgcccggcaactgctatgagggcatgccggtgtgctacgggcacaggaccggcaacacggtgggcggcagcgcctacccgtggagccagtgcacgtggtatgcgtaccgtcgccgcgtgtactactaccatctgcccaccggctcatacatgggcaatgggcaggattgggcgaacaccggccgcagcctcggctatctggtcaaccgcacgccgcacgtcggcgccgcgatggtgttccgtgcaggccagctcggcgccaacagacgttacggccatgtggcggtcgtcgagcgtgtgaacagcgacggatccgtgctgatctccgagtgcggcgccagccttcagggcgtggcgcaatggcgcacgatttacaatgctggtaatttccaatacgtgcattactgagttccgggtggtgttttccgattcgtccggtcacggcccgtgcaagcgggtctggtctcatgatgtctgtgttgatgtgagtgattgaagaggaagaccatggcaaaggaacagggcactgtgctcatcgcacagaaccgcaaggcccggcatgattacctgatcgaggacaagtacgaggcgggactggtgctgaccgggaccgaggtcaagtcgctgcgcgaggggcgggcgtcgctcgccgaggcgttcgtctccattgaccgtcggggtgaaatgtggctggaaggtgccaatatccccgaatatctcaacggcacgtggaacaaccatgcgcccaagcgcaagcgcaagctgttgctgcatgcgcagcagatcgtcaaactgtcccgtcagatcgaggccaaggggtacaccatcgtgccgctcagcctgtatttcaaggatggtcgggcgaaggccgagatcgccctcgcacgaggcaagcgcgagttcgacaagcgccaggcgctgcgtgaggagcaggacaagcgcgaggcgctgcgtgccatgcgctacaagaacatgcgctcccggtgagagccgacggacggaaagcgctgtggacaggccgcaccggtgggtgagtgaggagccccatatcccgttcgatatcgacgtggtgtatgaggatgccggcatcatcgtcatcgacaagccgcatttcctcgcgacgaccccgcgcggcatgtggtatcggcagaccgcgctgattcggcttcgcgagatgttcgacgagccggacatcacgcccgcgcatcggctggaccggctcaccgccggcatcgtcgtgttcgtgagggatccagcgctgcggggcgcataccagatgatgttccagggccggaaggtcagcaagacctacgaatgcctggctccgtgccggccgacgacacggccgcgatacggcaccgtcgagcggctggaccctcctgccgtgttcccgctgcgccgacgttcgcacatcaccaagctgcgtggcgtgctgcaggcgttcgaggagccgcaggccgtcaatgccgagacggtgatcgatctcgcggcgggaggatatccctcgatgggcgggcgcttatgccacgggaggaacggtctgcgcgcctacgagctgcacccgctcaccggcaagacccatcagctgcgcgtgcacatgaactcgatagggttgccgatccatggcgatgatttctatccgcgtatcgtcgaacgcgcctatgacgacttctccacgccgctggaactggtcgcgcggtcattgcgcttcaccgaccccgtcagcggggagccgcgcgaattcatctcccgcatacctctgggttggtgaagtttacttcactttttctgttgacgtattcgcgtcttggcggtaatatgaagttaacttcatgagaagtaagcttcatgttatggaaggaattgattgaagacaagagtgagagaactgcgaaaacaatcaaagctgacgcaacagcaattggccgacttggtccatgtttcaaacagaacgattatttccatcgaaaaggaacaatatagtccatcgctaatgttggcctaccgaattgcggaagtgttcggcgtgactgtcgaagaattgtgttgtctcaaagagaacagggaattggaggataaggatcaggaagcgaattaacaatgtgagaagtttcgttacggcgatcgtggttctgattctgggaattgttctgcttgcctagagtgcgatcgatctcttcttcgcctttactcaatcaagtattgacagccaagccgaaaaggtcacggacgaacgcgataggtatattgcgatgaaaagcagcaggaaagccctgctgatcaccaattacgtaattggtgccggtgaattccagaggcagcagatggtattccgggtcgttggggtctggcccctcatccacgaatccgaagcgagagaataaatccatgcttggcttgttgcgcggatccacttgagtcagcacgagcggcgtgcgattggaacgccacgcatcatcacgaagtctcataatcaccgaggtgagcagcgtgtctccgagatgttgcccccgtaccttcagcgcggtggcgatgtacgaaatctggtagatgccttcgtgctccttggtggtttccacgccgacaccgtattcgcagaagccggccacttcatcatgcaggggaatgtccccggatacgacaagaagcgtgcgcataactccggtcggggtcttgcgcacgctgagaccgcgtatatatcctgtgggtccatcgcccattcggggtctcctggcttgcagcacaggaactgtctgagggctgtctgatggtctctggagcattcacgctcgatgacgagattcagattcatcgacggtgtcttcccgggtgcttgccctgcgtgacagatagtggcgagcgctgttggtcagcttcatccatttctcgtccactgcgttgcgcggcttgccgtcctcaggcggcgcgtatgccggaatcagtttcacaccggtgcttgatattggcggtgttccgccgtttcgtaatgtgtgggcaataagggactcgaacccctgacatccaccgtgtaaaggtggcgctctaaccaactgagctaattgcccgcagactcacactgtatcgtatagtctgtatcgggacgccggccgagtgtcgttggatggaattccgccgtcggtcgaaccgtggcgatgctgtgcttgccggcgcatgatatatgccgtaatcgtgcgaaagacgtgtgaggatgccgttttgctgggccaaatgtgaagctgcgtctcaacactcacgtaaagtgtgcaagagaagtactatccgtaggaggtcgatacaccaatggcgcatcaagacggggcagataaaggcgcatcggggatcgctcgcgttgggaagcgcaaatggggatacgatcccgatcaggtggacgctttcctggatcgtgcacatgcgctctacgagagcgaggatgcccatctcacgcagcaggacatccagaacgtgtccttcgatctgagcaagggcgggtatgacatcacccaggttgatgcggcgctgtcccggctggagcaggccgtggtcgacaagcagacgacgcgggagattaccgagcacggtcgtgtggcgtggaaagcccagaccgaagagctgtaccgtcaggtatgtgagcacgccgaccgcggcacgggggagcgattcgcgcgcggacatgatcgccggccgtcgtacgaccgcaagcaggtcgaccgactgatcgaccagatcgtggacaaggccgccgcaggccttggcgtggacggcgtgagcgaacaggacgtgcgcaagctcgccgatctgaattccggtgccgtctccaacgtggtgttcacgcagcgcaagggcaagaacggctatgacgagcgtcaggtcgattattacctcaactcgtgcgtgcagttgctcagccgtctcgaatcgttcgcgcgcgtctccgattatgtcggtggcggtcacgaatccggcggcagccggcgttcgtccggtgcaaggagcgcctccgacgcgggtgtgacgccgttgttcggcgcggacaacgcctatgcacatgcgccgtcgccggcgcggcaggaagcggagcctcagtccttcgcacctgcgaacgaatcgttccatgccctccatgaggcagaggaggcgctgttctcatcgcagacggccgacgagccgagcgtcgcggccgatgcgcagtccgttcctccctcgttcgctcccgccggcatgtccggcacggtcgtatccgcgcccgcctcagcgcttccgtccacgttctcggccggagcttccgccccggatccgcagtcgtcgttggcggcgctgtcccggcgcaccggcagaagcgtgagctcgagcaacgtgagcgcggatcatgccgcggctcctgccccggcaccggagattccgtctccggccatcccggcggcaccggcatcgttcgccccctcgcacgccgcggtatccgatcagccggccgcagtcgccgagccccaggctcccgaacgcgtcgccaagtccgtgaaggttcccgcggagccagttgcagccgcacccgccgttgctccctccgcgccggcccccatgccggtcttcgatcagcccgtggcctccgacgtccataccgatgccagtgtcgaggccctgccgtcgttcgcgccgtccccgtcgccgtcggcgaacgttcccgttcatgccgtagacgatgccgcgcagacgcaatccgatgactctcacaagtcatcgtcggatgacctattctccagcatgtacctcagcccggaaagcaagctcgatttcgacatccccgacctgtcgttccccacgctcaacacgggcgagttctatagcggactgagcggtttcggcaaggacaacgactgaccatttcgtcggcgcgggaagacagatacaccacagaagacataaagaagcattgcaatgagccagcataggaatacggttgtcattctcggatcgaccggttcgatcggcacgcaaggtctggatgtcatcagtcggcatccggagcggttcaccgtcaccggtctggccgccggaggcgcgcatgtgcggcttctggcacagcaggtcgcacgtcatcatgtgccgcaggtggccgtatatgacgaggccgccgttccggcgctgcatgaggcactcgaggaggtcggagctcggtacacgcagattcaggccgggccgcaggcggtcaacgccatcgccggttccggtgccgacctggtgttgaacggcatcacaggctcggtcggactcgaaccatccattgcggcgctgagggctggctctcagctggcgctcgccaacaaggaatcggtcgtcgcaggcggtcacctgcttttcggcgcgcaagtgcgcgatgaccagatcaatcccgtcgactcggagcattccgccatctggcagtcgctgcggtccggcacccatgccgaggtcagcagactggtcgtcacggcctcgggcggccccttccgcggctggaagcgcgccgacatgagcgacatcacccctgaacaggcactcaaccaccccacgtggcatatgggacccgtggtgaccatcaactcgtccaccctgatgaacaagggactggaggtcatcgaggcgagccgtctgttcgacgtgtcgccggatcgcatcgtcgtgaccgtgcacccgcaatccatcgtgcactcgatggtggagttcgtggacggagcgaccgtctgtcaggcgtccccgcctgacatgcggctgccgatcgccttgggcctgtcggcacctgatcgtctgggtgatgtcgcggcggcgtgcgactggacgcatgccagcgagtggacgttcgagccgctggacgacgaggcgttccccgccgtcgcgttggcgcgcgagtgcctacgcgcgtcggagaagcataccgcggtgctcaacgcagcgaacgagcaggccgtgcatgccttcctcgaccatcgactgccctatctgggcatcgtcgacacggtcaaggaggtcgtcgacgcgatggacgtggagcttcgcggcaacccgctgttcgcatccgtggaggaaatgggtcaagtcgagcgtgaggcgcgccggcgagccgatgatttgataaacagtcagaagtgaatcattcgcgcgaccgcgcccggattgatggcatggcacagccatgcgatcaatcagtcatgccccggcatggatgtggtgtcgcgcataatcgaacaggaaagaccaatcatcagcatgagcgcgttgccgcaaaccagtgcacagacgtccgcgaccacaggaacggcgtcggccgtgacaggatcgttccgcaagaccggagagccggatatcagcgagagcccgttgcatccgcgccgcagatcgcgtcgcatcatggtcgggccggtgccggtcggcggcggcgcccccatctccgtgcagtcgatgaccaacacgctcaccgcgaacgtgccggccacgctgcagcagatcgccgagctcaccgccgcaggctgcgacatcgtgcgcgtagcggtgcccagccaggatgacgccgacgccttgccgcagatcgtcgccaaatcgccgattccaatcatcgccgacatccacttccagtcgaagtacgtgttccaggccatcgacgccggctgcgcggccgtgcgcgtgaaccccggcaacatccgcaaattcgatcaggtcggccccgacatctgcaaggccgccaccgacgcgggcgtcagcctgcgcatcggagtcaacgccggatcgctcgacaaggagctgtacgccaagtacggcggtcccacgcccgaggcgctcgtcgcctccgcgctcaaggaagcccacatgttcgaggacgtcggcttccgcgatttcaagatatccgtcaaacaccacgacgtgattacgatggtgcagacctaccggctgctcgcatccaagggcgattggccgctgcatctgggagtcaccgaggcggggccggcatggcagggcaccatcaagtcatgcctcgcgttcggcgcgctgctggccgaaggcatcggcgacacgatccgcgtgtccctgtccgcaccgcccgtcgaggaggtcaaggtcggctgcaagctgctggagtacatgggactgcgcaagcgcaagttcgacatcatctcatgcccgagctgcggtcgcgcccaggtcgatgtcatccagctggcgaacgcggtcaccgagggactcaagaacgtcaccgcgcccattcgcgtcgccgtgatgggatgcatcgtcaacgggccgggagaagcccgcgaggccgatctcggcgtggcttcgggcaacggcaaaggacagatcttcatcaagggcaaggtcatcgagaccgtgccggaagaccagatcgtcgagacgctgctcgcgcgggccaacgacatcgccgcccagatggaggccgacggacaggtgccggtaggcgccaccggccctgtcgtcatccccatccagcatccgaacgcgatgaacgccgttcgctgaggattttcatcggcgtccggccgccgtcgccgccggcatccggccggacggcctgagcgcggccggatgccgtcagctcacagcgcagaagaccggcggattggctagtatggttgcgtgttgaatcggcagcgtaacaggtttcgtatccgccgcggcgaacgtcccgcagacgggaagtcgcgcgtatccgacgaatcggccgcatcgcggcggcaaccgggcgacaaggtgtcgccggccgcctggacgcgatggcaccgtctgatgtgcaccgtgccgattttcatcatcctcatcggcctgctggtgttcgtctccaatgcgacgaccatgccgtggaacaatgagcccacagggcagactttgtcgacactgtccgccgataccggcgtgacgttcgacaacccgggcggcgttcaccttgccaagcgcggcgagtacgaggtgagcgagcggtccgtatggttcgacgcgaagagaccatcaacgggcgagatccaacgcacgcatgtcatcatccgcgagcctgtcggcgtctccgggaagctgcccggcatggtgttcatgcacggcgcgggctacggttccgccgtcgattcgttcggcgacatggcctatgacctgtcgtccgcgggattcgtcaccgccgtgctcgacaagccggtatggtccacgaacgacataacgcgcgattatacgggctcggcggccgtctatgacgaagtgatccgcatgttgcgcggcctcgacaacgtggatgacagggaggtcggcatctacgcgacctcggaatcgacatgggtgtcgtcatatctgctggacatggacaaggacatcgcgttccaggtgctgctcagcccgatggtgttcacgccgcgacaggcgatagggttcctcgccgcacaggatttcgcgctggtcggagcccatgacggataccagtcgatagtccggcgcgtgttcaacatcgattccgcgctgttcggcgtcacgcttcccgacgtccatacgctcaagccgagcgcgtattcgattccgacgctggtagcgtatggatcgaaggacgtgatgaccgcccaggtggagggcgtggaggcgatcgtggacatggccctgcgcacgggcaaccatgacgtgagcatccgcggctatcccgtggccaatcatgtgctccgattgggcgacgaatccgaaaccgggacgccgttcgcggaccagtacgccgatgacgtggtggattgggcggtcggcacggcgaagggcctgcaccagacgagcgagcgcgtgggaggcgtgaacctgtatcagtcgatagcagtgccgaaagacctgaaggcgaatcgcggactgacggtgtacgggctgctgctgcacgtgttcatggtgttcatgatggtgctttcgctggtcatcgccgtggtcgcgctggtggtgaagatacgcgcgatgatccgtcgcaccggtccggcgctggggttctcgcatggtttcggcaaccagctgctcactctgacggtcactaccgtggccacgctggccctgttcggcgccggtctcggacaggtcatcatgggtgtggtgaagattgcctggggcggtgcccctccagagaagcccggactcatgtattggagctggccggtcatccaggtggtgtgcacagtggtggtgtgggcgtggtcccgcgtgttggcccgtctgatcgaagtggcgtcgctgcgcggtgtcatccggttccctccgcgcaagggcgcgatcggggacgtgatgaccggccgtgatccggtgctcgcctcgaccagacttggacgcgtgctgttctgggtgacggctgtcaccatgctgtcggttctgctgatgttcgcgttctggggattgttcgtctactgacggtgttcgccgcagcgaacggtggtggaaccaatggatacgcgaggaacgggaggaagcgcttatgccgctgtatcgtgacgaaggcgtcgtgttgcgtacggccaaactcggtgaagccgaccgcatcgtcaccttgctgacccgcagccatggcaagatccgagccgtggcgaagggtgtgcgccgtgtgaaatcacggttcggcgggcggctggagccgttcatgcgagttgacgtgctcatcgccactggacggaccctggacgtggtgtcgcaggccgagtccatttcggcgtatgcggctcagatctgcgccgattacggggcgtacggcatcgccaatgtcatggtggagaccgccgacaagctggtgtccgccgaaggggagcgggccgtcgcgcagtaccgtctgctggtcggcgggctgaacgcgctggcgcgtcacgcgcatccggcggcggcgatcggggaatcctatatgttgcgtgcgttggctttggctgggtggactccgcggctgcattcatgcgtggtgtgcggacggcatgtcgccgtctcgccggtcgccggggagagcggcgatgacgggggcgccggggaaggccgcatgtcgggcccgatgttcttctccccgtccgccggcgggctgatgtgttcgaccgaccgcacgcccgatgcgaaacgcatcgacccggacgaggtggtgcagctctcggcggcggtcgacggggattggggagtgcttgacggggctccgccggatgcgcgggtgttgcgatttgttgaagactggggcgagtattatctggaacgccccattcgttccttgcgcttgctagattagcggtatggcttttgaaaacgtcgattacacgtcgctggacattccggcggcgccattttccgatcctgcgcgtatcccggatttcccgaagaacaaggtgccccgtcatgtgggcgtgatcatggacggcaacggccgctgggcgcagcagcgcgggctggtgcgcacggacggccatcaggcggccgagcccgtggtgttcgacacgatcgccggtgcgatcgaggccggcgtgcggtatctgagcctgtacacgttctcgaccgagaactggaagcgctcaccgcaggaggtgcgcttcctgatggggttctcgcgcgagatcatccaccgtcgtgtcgcgcagatggacgattggggcgtgcgagtgcgctggtccggtcgccgcccgaagctgtggaagtcggtgatcgacgagcttgaggtggccatggagcgcaccaagcacaacaaggtcatcgatgtggtgttctgcatcaactacggtggccgcgccgagatcgccgacgcctgcgccgagatcgcgcgcgaggtggcggcgggacgcatcaagggcgaccgcgtcaccgagaagatgatcgccgaccacctgtacaaccccgacattcccgattgcgatctggtgatccgcacctccggcgagcagcgcacgtcgaacttcctgccgtgggaggccgcctacgccgagcttgatttcgtgcctgaactgttccccgactgcggccgcgatgtcctctggcgctccatcgaccactacatccaccgcgatcgcagattcggcggtgtgaagaagtaggattcccgtttcgccctgtgttggcgggtctgttgtgaggcgaccgggagagcgctcctcgggcgtcaagaccacccccagtttcgctccgctcaacagcccccgccagtggggggggcgagaagaggaaagctgctcagtagcagtcccaggtgtagaggacgcgtgagaagtcaagccgttccagatcgctgggggagatgaagaagttcgccacgccggagtcgccgaacgacacatcgttggtcgaatcgatctgcagcagcaggtcggtcgccttgttccacagcggatccctgtcatcatgcgggtcgctttgcgtgaagatcgggtatccgccgacctggtgcccgcccgacatcagcagtgcggcgagcgagtcgcgaatctccgcctcatgttcgcggaagaagccgtggtcgtactcgttgagcgtgctgacgcagctttgcagccgtccctcgaaccggtagtcagtaggcgtgatcgtctgcttgccgacctgtgcgactagccgtcgctcggtgtcggggtcgttgaacggcagcaccgtgtcgtcatgccaggcgggtttgacgacacggttggcatgcagtgcggtgaccggcacgttggggaggtagcgcacgcgccacgagcgttgcgactgcgggttgtcgtagtccgctccgtacagggtgtcctcgccgtcgatgaagaactgcagcagtccttgggcggggaatccgcgcagctgcggcagttggctgaagttcagctgggccagcagatacagcgggtctccggtgtcgagattgcgtggcgccttcatgccttccggcacgtagaacgcgccgccgagcttgctgtcggtgatctgtgcgggggagtcgtcctcggtcagacgcagcaccggcatttcggtggaatatcgcagcagttgcgaaagtttctcggcaacgtagtcggtgatcctggggatgtgcgcggtgtcctcgtaggcggcgtttcgctgggatctgccggtgacgccaagctggtcgatggggttgcggggcccctctttgtccactttccctacgatttcctgggacggtgtgtcacgaccgaataatttgtccagcaatcccatgtgattccccgttttcagatcatcatccttgcacaggaaagcctagcagctgaaaggcgatttcgctgacgcgattggtgaaggcttggtaccgtcttgcggcgtgtcttcccgattgcgtcagcggattggcctcagccagtccaggccgattgacttgagatgatgcagcgtcagcgaggtgacggtcagcgagccggattcggcgacgagcccgatcgcgcggggacccttgggcgcgtagctgtacgagctcatgacctgcttgccgccgttgacgtagacctcgacactgccgcggtccacgaacacgcgcaggcgcaacagtcgtcgtcctgcatggggatcggctcgacgaaggggctcatccacccgtacatgatctgccgcccgttcgtgttgaacgactgcggcgcgtagaaattgtggccgcagtcccacgggcggaactcggtttccggcttgaactcgccgtccttctcctgttcgagggacggggcgaaggcgatgggctcgcggcgctaggtgaccatgtcctcgctggagacatgaccccaatggcacaggccccactgggtgccgtaggggtgcagctggtagaacacgtgccagcggcccttgtagtagcacaggccgttcgggtcggcctccttgcggagctcgtccttctgttcggacgggacccggaacaggtagatgagcagcatgccgaggccgcaggcggccatgaagccggccgacagcacgatggagccgatcagcgcgcccgtgcgggtaggtcttgttgggtgctgagggttctctgcgcggctgccgtgccgttgtggggaatcgtgttttgtgctggaataatataacgtcaatcgattaagtcaaacgattgacgttgtgtgtcgtgctgcggaagagggtttccggcgaggattaacggaacatatctaccggtgagtgcggcatgaggtaaggtggaacgcatggctggaaacttcgtgcaactgcataaccacacgcactactcgctgctggatggggcatccaaggtgcccgatctggtcaagcgcgtcaaggagctgggcatgccggcggtcggcatcaccgaccatggcaacatgcacggcgcctacgagctgtggcgtgcagcggtcgattccggcgtcaagccgatcatcggcatcgaggcgtatgtgacccctgaaaccgcgcggcaggacaagacgcgcgtgtcatgggacaccaactggaccccggttcccggccatgcccgcaaccccgacgatgtctcgggcggcggcctgatcacccacctgaccatgtgggcggagaacgacgaagggctggtcaacctcatcaaggcgtcgtccgtcgccaacctcgaaggccgtgtcatgcgatatccgcgtatggacaaggaggtgctgtccacctactccaaaggcgtgatcgcctcgtccggctgcccctccggcatcatccagacccgtctgcgcctaggccagttcgacgaggcgctgcgtgccgcaggcgagttccaggacatcttcggcaaggacaatttctacatcgagctgatggaccacggcctgtccatcgaaagcaaggttaccggcgatctgctgaccatcgccaagaagctcggcgcgcccctgctcgccaccaacgactcgcactacgtcatggaggcggacaaggacgcccaggacgccatgctgtgcatcaactccggcgccacgctggacgaccccaaccgcttcaagttcgaaggatcgggatactacatcaaatccgccgaggagatgcgcgagctgttcaaggaccatcccgacgcctgcgacaacacgctggagatcgcggaacgctgcaacgtgatcttcgacgaccatgaggatggcgcgttcatgccgcagttcgactgccccgaaggttgggacgagacctcgctgttcctcaagaaggtcgaggagggcctggagaagcgctacgacggcaacccgccgatggaggtgctcaagcaggccgactacgaatgcggcgtcatctgccagatgcagttctgcggctacttcctcgtcgtcgccgactacatcaactgggcgaaggagcacggcgtgatggtgggcccggggcgaggctccgccgcaggggccatggtcgcctatgcgatgggcatcaccgagctcgatccgctcaagcacggcctgatcttcgagaggttcctgaaccccgagcgtgtgtccctgcccgatatcgacgtcgacttcgatcccgaaggccgcatgcgcgtgctgggctatgtggccgacaagtacggtcatgacaaggtcgcccaatgcgtgatctacggcaccatcaagaccaagcaggcgctcaaggactccgcgcgcatcatgggattcccctttgagacgggcactcgtatcaccgaggcgctgccgccggccgccaccggaggcaaggacatcagcgtgcacgacatcttcgacccgagcgccaagcgctacgccgaggcgcgcgaataccgcgagctgtacgactccgatcccgaagtcaagcgcatcaccgaggaggcgaagggcatcgaggggctgattcgccagaccggagtccacgcgtgcgccacgatcatgggttccgcgccgatcaccgacacctcgccgctgctggagcgcaccgacggcaccgtcaccaccacgttcgagtaccatacgtgcgaaacgctcggcctggtcaagatggacttcctcggcctgtccaacttgacggtcatccgcgacacgctcaccaacatcgagcacaacggcaagggcgtcatcgactacacgaagatccctctcgatgaccgggagacgtaccagctgctgtcgcgcggagacacgctcggcgtgttccagctcgattccgacggcatgcgctcgctgctcaagacgctcaagcccgataacttcaacgacatctccgcacttattgccctgtaccgaccgggcccgatgtcgatggactcgcacaccaactatgccaagcgcaagaacggcctgcagaagattacgcctatccaccccgagctcgacgagcccctcaagcaggtgctcgatgagacgtacggcctgatcatctatcaggagcaggtgcagtcagccgcgcgtatcctggccggctattcgctgggcaaggcagacgtgctcaggcgagccatgggcaagaagaagcccgaggtgctggccaaggagaaggtgccgttcttcgccggcatgaaggagcatggctattccgaggaggccgcagaggcgatctgggagatcctggtcccgttctccggctatgcgttcaacaaggcgcactccgccgcgtacggcctgatctcctactggaccgcatacctcaagacgcactacccggtcgagttcatggccgcgctgctgcagggcgcggcgaccaacaagaacaagaccgccctgtatctgggcgaggctcggagaatgggcatccaagtgctctccccggatgtcaacgagtcggtctacgagtactccgcagtcggcgacgtcgtccgattcgggctcggggctatccgcaacgtcggcgagaatgcggtcaaggacatcatcgcggaacgcgagacgggccgtggcaaatacgtgaacttcatggacttcatccgccgcgtgccgttgaccgcgctgaacaggcgactggtcgaatcgctgatcaaggcgggcgcattcgattcgatcgacccgaaccgccgggcgctgttcaccgtgcacgagtcggcgatcgactcggtggtcggcctcaagcgcaagcaggcggaaggacagttcgacctgttctccgacacggaggattcgggcgccgacgcgatgggggatgcgacggtcgccgtgccggacatcgaggaatgggacaagaaggacaagctcaagttcgagcgcgatatgcttggcctctacgtgtcggaccatccgctgagcggcatgcaagcagtgctcgccgggatgcgggagatgtccatcgcccatctgattgaccgtgcgcccaccatgcccagcgggcagcaggtcacgctggcgggactgattaccaacgtcgatcgacgagtctcgaagaagggcaacccgtgggcgatcgtcaccatcgaggacatggaaagctccatccagtgcatgttcttcggcaaagtgtacgaggcggcgagcacggagctcatacaggatgcggtcgtgcaggtgcgcggccaggtcgaggttcgggacgagaccgtcagcatgcgcgccacggaaatgcagccggtcgcgctggagaccgatgacgagcgtccgttcctgatcaccctgccgctggtggccctggggcgcggcaacatgcagcagcttgcgcagatcatcacgcggcatccgggattctgcgaagtgcggcttgccgtgctcgacgccaagggcaacgcacgggtgatgaccttcggcgataggttccgcgtcaaacgcgacaccagcctgttcgccgagatcaagagcctgttcggcccgagctgcctgccgacggcctgagaccatcagccggaatgtgaccatatgcgctacggaatccgctgacgatgggtgtatgcaggtagaatgagagcgaaacggggccgctggctgccgtcaattatgggcctggagctagagggaagaacgatgatagtgtgttcacattgcggcgcagacaacgccgatggaagcctgttctgcagggcgtgcggtgcacaattgacggcggcgacggcggtgacggcacagccggccgctgcggcaccggcgacgcctgcgtacacgacgcagccgcagacttcggcttcgcaggttcctcaatcggcacaggttcctcaatcagcgcagtatccggcgcagccgccgcaaccggtacagacgaccgggatgcctcccgttcccgcgcccgccgttcccgcggcgcccggcaccgcttaccagcagcagccgcaaatggccggataccagcagcagccgtatcgggctcagacgtatccgcagcagccggtcgattctcagcagtacggccaataccagcagccgggcgttcccggagtccccatggctcccgcggcaccggtcgcgcagaagaaatccaagaagccgctcatcatcgtgctcgccatcatcatcgtggccgcgctggtcaccggtggcgtgttcctgttcctgcacctgtcccagccgggcgtcaacggaacgtattcactcagcgccggcggcaacaccggcaccctgagcgtcgacggaaagaagatgtcgcttgatctgccgggcaatgacgacggaaagccgacggtcagcgccacgatcgacaaggtcacaagtggcaatggcagccattcatacacgctgaaggatctgaagttcagcggtgcgagcggcaattacgtgatgtccgaggtcaccggcctcatcgggtacatcggcggtctgggcgaggaacagggcacggccgttctcaacgcgctcagcccgaccgtcaccatccccgatggcgcgtccaagggcgagccgaacggcacctggtcggtctcctgctcggtcatgggactgggcatgggcatctcagccaacttcaaggatgatggcacattgacgatgtcggtacaggccaccggtcatggcgagtcgacgctccatggcacatggagcaagaccggtgacgcgacattcgacgtttccctcgatgatcccgatatgactatgacactgtcattgaagaagtgacctgcacgcgctgaaaatatggttgtggccccgacacgataccggtgtcggggccacaaccatattcgcgcacgaggaattcggccgccgtcactcgcgtacgaggcggatgtgctcgatgtcgttgcgtgagctcttgcggtacagcacgaaccggttgccgatgacctgcaccacctgcgcaccgatctggccggcgagcttgtcggcggcctccttcgccgtcagaccggagccgtcctgcacggcgaccttgagcagctcgtggctgtccatcgtctccgatgcctgcttcaccgcggcgtcggtcaggtcgttcttgccgatgtagagcagtgggttcagctgattcgccatcgcgcgcagctgcttgacctgcttcttgctcaatgccatgtttgatcctctccgtcaatctgatgtgctgtgtacgaggatagcggagcggcacgatgaacggcatggacgcttctggaaatccttcaaaacaccgactaatgtctatggcggggacgaaagaaatgcgacatcatgtctggtaatgatgtcgcagacatccacaatatcctcaaggaggcggaatatgtactattccagtggcaactatgaagcgttcgcacgaccgaagaagccggcgggtgtcgacggcaagtcggcgtacatcatcggcacgggacttgcggcgctgtcggcggcctgctatctggtgcgagatgcgcagatgccgggcaagaacatccacatcctcgaaaaggacgcggtggccggcggggcgtgcgacggcgccgacatccccggcctcggctatgtcatgcgcggcgggcgcgagatggacaaccacttcgaggtaatgtgggacctgttccgctccatcccgtcgatcgagaccgaaggcgtctccgtgctcgacgagtattactggctcaacaaggacgaccccaactattcgctgtgccgcgccaccaaggaccgcgggcaggatgcgggactccagggcaaattcgggctgagcgacaaggcctcgatggagatcatgaaactgttcttcactccggacgaggaactgtacgacaagccgatcaccgatttcttcgacgacgaggtgctgaaatccaacttctggctgtactggcgcaccatgttcgcgttcgagaactggcattccgcgctggaaatgaaactgtacatcaaacggtacatccaccacattggcggtctgccggacttcagcgcgttgcggttcacccgatacaaccagtacgagtcgatgatcctgccgatggtgaagtacctcgaagcgcacggcgtgcagttccactacaacaccaaggtcgagaatgtcgagtttgcgatcggcggcgggaacgggcccgaacgcaagcgcaccggggtcggacaggacacgatccaaaagatccaggccacgtccggcttcttcaagcgcaacccgtacggcacgaacacgaagaaactcgccgtccgcatcgacatcgaccacgaaggtgacaagtcgtccatcgacctgacgcagaacgatctggtgttcatcaccaacggcggttgcgtggagaactccacgatgggatcccagcattcgccggccgcatggaatccggacctcaagcccggtggcggttgggacatgtggcggcgcatcgccaagcaggacccgagcttcgggcgtcccgacacattctgctcggacccggatgccaccaagtggatgagcgccacggtgactacgctcgacgcagagattccgccgtacatcaaacgtatctgcaagcgtgacccgttctccgggcgcgtggtgaccggtggcatcgtgaccgtggaggactccaactggctgatgagctggacgctcaaccgccagcagcagttccgtgaccaacccaaggaccagctgtgcgtatgggtgtatggcctgttccccgacaagccgggcaactatatcaagaagccgatgaccgaatgcaccggcgaggagatctgccaggaatggctgtaccacatgggcgtgccgaccgacaagatcgaggcgctcgcgaaatcccacgcgaacaccgtgccggttatgatgccgtacatcaccgcgttcttcatgccgcgttcggccggtgatcggccggacgtggtgccggatggcgccgtgaacttcgcgttcctcggccagttcgccgagacaccgcgcgacacgatcttcactaccgaatactcgatgcgcaccggcatggaggccgtgtacacgctgctcgacgtggaccgcggcgtgccggaggtgtggggcagcgtctacgacgtgcgcaacctgctcaacgccacggtcaaactgcgcgatggctccccggtcaccgatatgaagctcaatgtcgtggagcgcgccgttctgaagaaggtcctcaagaaactcggcaagaccgacatcggcatgctgctgcgcgagtacggggcgatctgacggcatcggcctcgcagcgaaccgttctcattgggaaacgtgtgaggattcctcacgtaaccgcacaagtgaacatttcggtaaggcccggaattccgggcctctgaagggttccgtgttcgtttggcgggccgcagggctcgcacgtttcccaatgagaacggttcgctgcgtatcgcgggctgtgtcatcgccccgcctgatgcaatgctttcagcgtctgcagcagttgctcctgcaaggccgtcctgccggcgaagtactggaagtcgtcgatgagtaccatgtcgatatgcctaaaccggttgtcggacagggtgatccggtcttgtcgcgagtcggcatcctgcgccgtcatgacgaattcattggcatgatcctcactggtgagatagaggcacttcgcggaagggagtcagcgcgagcgtttcgaatgtctgatccctgttcagacgtgcagtcagattgatgacgggcatgatcgtctcctgtgggttgctctccattcggtagacggattcgcctcaccgaatgaggggattccaacatagggtccgattcacttatccggtagatatgttcctcttattgttgcgtgtatgtcgacaccagatattccccggtatcgtgcagcatcttgcgcaatgaagccggcgacaatatctcgatgatgtgcgagtccgcgtactgcaacgcccaccaaagggtcgcgtgttcgttcgcgacgacgtgcacatcgtattcgcgctcgccggtctggacgacatcggcgtcggcgaaccagtcgtacagcggttcaagcgccccgtggatcttcatgtggatcggcgtcgccttgccgtccatcggataaggtcgctcgttcatatgccgcacgatgtcgaacggttgccccggcgtggggctgaagctgtcgagcgtgcgtttgagtgagtggtccggcccctcgatggacaggtcccggatgcgttccacatgcaggtaggacagcgagtcataccggtgcatgtggcacagcaggtagtatttgctgttcttgtacatcaggtggtaggggtccgccagatatgtcttgatgtcgccgtcgccgttacggcggggggcgagattgccgttgacgtcgtacatgcagtaccggaaccggatcacacgcccgtatgcgatggcatcgttcagaatctcgatgttgttgaggaactccgtattgtagttcttgggcgtggtgagttgttcgaggccgcgcaattggccggatttgccggcgaacgtgtagatcttggcgatgagttcgcgtaggtattcgccgtccgagctcgacagcgccgcgccgtccacgagcaggcgcatctgcgcgatgtcgaagaccggttcgatgtaccagccgggtcgggggttggcgctttccgcgttgaccagatcccgccggtcgaggtggcccacatggcggtcgaacggcgtcatggactgcaatgccttgagatgcccgcgcacggttttgtcggatacattgatgcgtttgctgatttccgcggcagtgaggccgtgctcggggtcggtgtgcttgatgagctgttccaggatttcgatgacgatctgagcggtggggagtgccgatgatgcagccacgatgtctcctctcccttgacggataccgtgccacctgggtgattaaaacggtagataactaccggtaatcatatcatcgcctgttgcgtgtggcgtatcgctctcaatgagagcgatacgccacacggataaggatccatcagaaatcgaaattgtccgggtcggcgctgttgcgcttgccggtgtccatggcactgatcgcagccatgtcatcgtccgacagcacgaagtcgaacacgtcgatgttctgcctgatgcgatcggcgtgcgtggacttcggcagcacgacgacaccgcgctggatgtgccagcggatcacggtctgcgcagcggacttaccgtacttcgcgccgatctcggccagctcggggatggcgagcaggtcgccgccggtgccgcccagcgggctgtacgcctcggtggcgatgcccttggcggacagctcgtccaccagcggctggttggtgaactgcggcgaggattcgatctgatcgacggccggcgtcacgtcgctgttcttcagcaggtcggcgagatgatgcggctggaaattgctcacgccgatcgccttcgcacgcccggaggcatagatctcctgcaggtcgtcccacgcctgctgccagacgtccgccggccagtggatcagatacagatccacataatccatgcccaggcggtcgaggctctcctggaacgcttctttgccgcggtgcgcgcgaatgtcgtcgttccacagcttggtggtgacgaacaggtcgcctcgcggcacgccggaacggcggattccctcgccgacagacgtctcgttgcgatatatcatcgccgtgtcgatatgcctatatccgttctccaacgcggcttgcaccgcgtttaccgtcgtgtcgccgtccggcgtgcggaacacgcccagaccgatctgcgggatgaccgtgccgttgttcagcgtgatcgtcgattgaatcgccatgaccattgtctcctgtgatattgccgatgatgcgtcgcagacaattgtaatgatgccggcgaaggcgaatcgacaggcgagcaggcaatgctgcgcccgcaggtcgtcccaaatcgcaggtcccggccgggactgaggggggcgtttcctcgccgtgcccgaccgcgggtgggccagagatgaacgatgacgcttgcgcatgcatggccgcgtattaccatgagtactggttcgcaggtgtggcgccgtggggtgccgggcggcggcgatcgtccgccgcgaatccgtggggaaacgaggcatatggtgagtgatgacacgacgcgggggcagcaggggagtgccgatgctccggagctgacgctgaacgacaaggcgcattcggtgattcctcagatagggttcggcacgttccagattccgccggaggacacacagcgcgcggtcgaggaggcgctggagatcggctaccggcacatcgataccgcggccgcgtactacaacgagaaagaggtcggcgacgcgctgaaggccaccggcatggccggcaaggtgtgggtgacgaccaagctgcgcaactgcgaccaggggtatgattcgacgatggtcgcgttcgaccgttcccgcagcaacctcggcgtcgacgtggtggacatgtatctgatccactggccattcgccgcggcggggttcttcaaggagacgtggcgcgcgctgttgaaactgcgcgacgaaggcgcggtccgtgtgcccggcgtcagcaacttcctgccgcagcacctgcgtgcgctgatcgaggattccggtgagaccccggccgtgaaccagatcgaggtccaccctcggttcaaccagccgggaaaccgtgcgttctgctcggcgaacggcgtggccgtcgaggcatacagcccgctcggccacggaaaggacatcgaatccgagcccgtcgtcgccgcggcgaaggcgcatgatgtcacgccggcgcaggtggtgctgcgctggcacacgcaggaggggcgcatcatcatccccaagtcgaagcacgtggaacgcatgcgggtgaacctcgccagctccgatttcgatttgacgtcggccgaactggcggcgatcgatgcgctcgacgacccgcatggcaacgtcagcgccgatccggcgaccttcatgcattcccagtcgtgggccgaccagcacgtgcgcggcaatatctgattgtggcggggaggggcggtcggcgggatcacccccagtcggctgcggcttggtctatgggcgagatgtaagcgggcgtgggttgtgcggaggtgtgcggtatggatggtgaaatggagcgggtcttgccggatgatgcggacgatggtgccgaacgccggtggatcgatgacacgctgaaccggctttcgcgctcctcattccgtgcgaaattcgagttgtcggcgaaggaccgcgcgtatgcgcgggcgaagggcaaggccgtgatcgatcgccatgcccgcgagctgctgcgcgcccgcatcggggcggcgaatccgagcaacgacgggcgccagacgccgtggcgcgggcatccggtgtttatcgcgcagcatgccaccgccacgtgctgccgcgggtgcatcgccaaatggcaccatcttccccaaggcagggagctcaccgatgccgaaatcgatcgcttggcggacctggtcatggcgtggatagagcgcgatctcatacgtcatcccgccgtctgagttcgtccatcgtgctgcatccgccgcgggcgaggcatacggttcggggccgatgttgccgccgccgaaaaaatatgaaggcgattacaatcgtgattttttgtgaaggtgttgcgtcgctgctggataaatgaccgtttctcagtcgcagaggaagttatggcgatgatggcacaagacggaacctgtctcatatcacggtcgtcgcgaaaagaaaattacggggttgtaatggaaaaaccagacaactattttcaaggaaagcggtgcgtggtggcactgatagtggccatgacgcttctttcgggagcgggattcacggcgtccgtagcatccgtggacaccgacacggtgggctatgagactgatcgcattgcattttcaggggctcggaccgtatgcggggagtgctccatcgatttcgcggctctgacccgctcccggatgttcctgattgacggggggtggcgtggaactgaaggggcctgacaccgactatcagtgcccgggtggcatcatcggctttgacaattgctcgaatgccggttacggcagtgcggagatcatccgtccgacggatgtcaagggaaagaagaagccggattcgtcgcgtccctatctatgtttcctggccgaacacatgaatgtgcctcctgctgacgatgccgtgtactatctgcaggaatgaccgggcgcgggcctgcgccggaccggtgtagaggtgaccgggctgtcgaagttgtgccacaccagggcaatttcggcggttttgagcgtggtgtggccacgtccgtatgtagagatgtttacacgtggcgagcaaaccgttggaaaatggcggtttgtggtttcagccgtctacccgcgctgtaccataccagagaatgataaggttaacatcgcattgtgaggcacgcgaattgccacacaatgcctaaaagacgtgttttttcgctggtgtggtacagactcgacgccgatcgtctcacattgcagacggtgaatctcgaagcatggatggcgcggccctgccggtgcatggcatgatgatgcgactcgtgtcagaccgcggattcacgtcgcttttttcggtcagccgccttttcccggcgtgccagctcctcgaccgtcatggcgatcacatgaaaatcgacgtcacagccgcggagggtaagctcacgcgcgacactgagcgcgaattcggcacatgcgacctcgtctctgatgtcatcggccgttatgacgatgatcgtccaacccaattgccgaagccggtctcgttttttgcgatccctgcgccattggtgcttgtcggtccgatgatgatcgccgtcgtattccacggcgaccttgaaatgcttccatgcaatgtccaggctcattggcttgcccgaatcgaacatcgccctgtcgacatggcagttgacctccgcgtcgggcaggccgtgccggaggagtaccagtctcgccttgctctccttcggcgacagcacgttggccttgaccagctgcagtgcggtccggcaagcggtcttcccgagaaagtatggcgcattgtcgatgaactcgcgcaaggacgacaagaccagtcggggatatctgcccgatgatttcgatatggcggtgatgatggcctccgccagtatgacgagttcctccaaggacacgtgtgatgacagctgcgcccaggcatggaagggatgcaacgcgaatacattgcccttgatcggtacgcaagcatcaggataagtggcgatcagcttccatacatgcggatgcgtgccgggaatgcggcgccgcctcctgtcgggagtgctggaggtgatgtgcagcatctccgcgtccagatcgcagacctccggcaacggcacctgctgcagggcgagagcggtggtcatgccgaacagcacattgcctccgatgcgccacgccaatgcggcgcagcacatgatggcatcctgggcgcggtcgcgcagcgattgcgtcatgggcgttctctcgcccatcggctggggcatcacatcgttcatgaatgtcacggtagcgtattcgcgctgtcggtgtgatgaaccatggaaaaaatgtggatatgtggatgaatgcatggatatccacagctatccacatcgctgacgagcctgcgatttctcacgatgtgggtgatacggcgattctgggaggattacgacagcgtgcattggtacgatagggcgttatgagcgagaacatcatgcgaatcattgatctgcggggcaagaacctgtcccgcgccgagttacttgccgcgatgccgcgcgccgcgatgggcacttccgaagccaccgatctggtgcggcctattcttgacgacgtcaaggaacgcggcgccgcggccctgcgagacttcgaggagaagttcgatcatgtgcgtcccgagcacctgcgcgtgccggtcgaggcgatgaccgcggcacttgagacgcttgatcccgaagtacgcgccgccatcgaggagtccgtgcgtcgcgcacgcgccgtcgccgccaaccaggtgccgaaggacttttacaccgatctggccgaaggtgcccgcgtcgccgagcgttggattccgatccagcgcgtcggtctgtacgtgcccggcggcaaggctgtctacccgtcttccgtgatcatgaacgccgtgccggcgcaggccgctggcgtcgagtcgctggccatcgccactccgcccgcacgcgacaacgcggaaggactgcccaacaagaccatcctcgccacctgcgccatcctcggcgtcgacgaggtctacgcggtcggtggcgcccaggccatcgccatgttcgcatacggagccaagggctccgagccgcaggacggagacgtgctgtgcgacccggtcgacaagatcaccggcccgggcaacatcttcgtggccaccgccaagtcgctcgtctccgcgttcgtgggcatcgacgcggtcgccggtcccaccgagatcggcatcatcgccgacaagaccgccgacccgagcctgctggccgccgacctgatcggtcaggccgagcatgacgagctcgccggctccgtgctgttcaccgattccaccgagatcgccgagaaggttcaggagtccctgaactaccgcgtgccgcgcaccgaacacgccgagcgcgtccacacgtcgctgtccggaagccagtcggccatcgtcctgaccgacagcctcgaccagtccatcgacgcggccaacgcatatgcggccgagcatctcgaagtccagactgccgacgcggacgccgtcgtgccacgcatcaagaacgcgggcgccatcttccgcggcccgtactccccggtgccgctgggcgattacatgtccggctccaaccacgtgctgcccaccggcggcaccgcccgcttcgctgcgggactcggcgtgcacacgttcatgaagcccgtcgaggtcatcgaatacgacgaggagggcctgaaggccctcgccgcgcgcatcaacgccttcgccgtctccgaggacctgcccgcccacggcgagtgtgtcctgtcgcgcttcgtcaaggatccgtacaacaaggccacgctgcgcgaacaggagaaggaagccggtctgcgctaagggctgcttgggtggttcgacccccagtctgccgcgcagacagcccccgccagcgggggcgatgagcggatcgaatgtgccgcgtgcgaatgcgaatacaacccccgtcagcgggactatagacggaaagaacagagatcaatgagtgagaacaacagcaatgcgattccggcgaacctgccgctcaggaacgatctgatcggcgaggagccgtacggcgcgccgcagctcgacgtgccggtgtgcctgaacgtcaacgagaacccgtatgcgccggatccggccgtgtgcgacaccatcgccaggcgcgtgcgtgagatcgcgcccacgctcaaccgctacccggatcgcgagcatatcgaacttcgccaggcgttctccgactacctcgcccgcgaatccggcacccgtctcgacgtggacgaactgtggggcgcgaacggctccaacgagattatgctccagctgttccaggccttcggcggcccgggccgcaccgccttgggcgccgacccgacctactccatgtaccccgaatacgcgcgcgacacgttcactggctggaagctcgcccaccgcaacgccgatttcacgctgaacgtcgacagggtaatcgaggccatcgccgaggtcaagccctcgatggtgctgctcaccagcccgaacaaccccaccggcacgccgctgccgatggccgacatcgaacgcatcctcgccgcctgcgagaccgccgacgtggcgggcgcgggcgaaggcgtccacccgatcctcgtcatcgacgaggcgtacgtggagttccgcaagcccggcacgccgagcgcggtctcgctcatcaagaaccacccgaacctcgccgtcagccgcacgatgagcaaggcgttcgcattcgccggcgcacgtgtcggctatctcgccgcgagcaagggcatcatcgactgcgtgcgcatcgtgcgtatgccctaccacctgtccgccgtgacccaggccgccgcgctcgcggcgttcgaacacaccgacgagcagctgagccgcgtcgagcacttgcgtgagatccgcgaatccaccgccgaatggctgtcacgtcagacctacaagggcgagccgctcgaagtggctgagtccggttcgaacttcctgctgttcggtgggcatttcgacgaccgcgaggccatcttcgacgagctgctcaggcgcggcgtgctcatccgcgtggtcggcccggacggctggctgcgcatgtgcatgggcaccgacaaggagatggaacaattccgtaacgcgctgaccgaagcattgcgtattgtagaaagcagataacaactcccgaaacgccggcggcgcgcgcgaccatcaacgtcatgacccgtcgtcggcgaccgccgaccggcacactggccggcaggcaagccgggacttatcgggacatatcaggatcaaggaccaaggagcacatcatggcgcgtaccgcgcacatcgtccgcgagaccagcgaatcgcacatcgaactcagcctgaaccttgacggcaccggcaagaccgacatcgacacctccgtgccgttctacaaccatatgatgaacgcgctcggcaagcattcgctcatcgacctgacgattcatgcgcacggcgacaccgacatcgacgtgcaccacaccgtcgaggatacggccatcgtgttcggcgaggcgttgaagcagtcgctcggcgacaagcgaggcatccgccgcttcgccgacgccaccgtgccgctcgacgaggcgctcgccaaggccgtcgtcgacatttcaggccgtccgtactgcgtgtgctccggcgaacccgacggcttcgaatactgcatgatcggcggccacttcacgggctccctggtacgccacgtcatggaatccatcgccttccacgccggcatctgcctgcacatgcaggtgctcgccggccgcgacccccaccacatcgccgaagccgaattcaaggcgctcgcgcgggcgctgcgcttcgcggtcgagccggatccgcgcatccagggcctgatccccagcacgaagggcgcactgtgatgagcggcaacgacgacaggcacggcggagacgacggtttcgacgacgacatccatttcagcgacgaggaacttgaggccgcgctggacggattcgagaaggaattccgcgattcgaacgcggctgccggcgaaccggcgaacgacgccgcggccgacagccccgcaggcgatgcgggagccgcggattccggtcaggcacaggaggccgacaccgcggccgcgttcgacgacgagctgcaagggcttctgggcaacaaggcgaaggccgccgtgctgattacgcgcgtcgcgtccgcccgcctgctcgccgcgttctgccagctgtcggacgtgtccgccgactgcatcggatcggaggaaggggccgtggccatcctgcgcaaccttgacggcgacgggcccgaagtcgcggcacgcgacctcaccatcgtcgtgtcgggcatgtcgctggtgctcgccgtcaaccgtgcggacaagttggaggcgaccgtctatctgcagggcaagccagggcagacgatcgccccgccgctgctgttcacatcgacggcgccgttcgtggaggatctgctgcttggcatcaccgacgaggacggcctgatcggcaccggcatgaaagtcgaacagtccgcggatctcgaccatgaccaggccatggccgtcatcgcggaacacacgaagttcgggcgtggctcgtcgcgcatcgaataatcgggcagccggcggacaccgcccgtgcccgtgcagccaaggattttcagactgaaggagacgacatgacatcggtggtggtattcgactatggattcggcaacgtgcgttccatggtgcgtgcgctcgccaatctcggccttgacacgacactgacctccgactaccggcaggcgcttgaggcggacggcatggtcgtgcccggcgtcggcgcgtttgccgcctgcatgaccggcctgcgcgaggtgtcgggcgaccgcgtcatcctcgaccgtctgcgtaccggccgccctgtgctgggcgtgtgcgtgggcgagcagatcatgttcgagcgcggcaacgagcacgcagacaccaccgaaggacttggactgatcggcggcaccgtcgatctgctggatgccgatgtcgtgccgcacatgggatgggacacggtcgaggcgccgtccggttccgcgctgctcgaaggcgtggagaacgaacggttctattttgtgcactcctacgcggcgatgagcgccaccgcgaaggatctgagcgccgagcaggtcgatctgggcagcgacgagcatatcacgtggtgcacgtatggccgtagcaggttcgtcgccgcctatgagcgcggcccgctgtcggtcacccagttccaccccgagaagtccgccgacgccggcaaacagctgctgcgcaactgggtcggcacgttctcgaagtagccggctgaacggcatgaccagccggcgcggccgggaaccccgactcgcccggcaacgcggacgacgggccccgagcctcaacgacttcaacgattccaaaggagaacaaccatgtcactcacattgcttcccgcggtcgacgtgcgcgacggcaaggccgtgcgcctgcgccagggcgaatccggctcggagaccgactacggcagcccgctcgaagcggcccgcacgtgggtcgaggccggcgccgagtggattcatctcgtcgatctggatgcggcgttcggcacggggaacaaccgcgcgcagctgcgtgagatcgtccatgagctcggcgacaaggtcaacatcgagatgtccggcggcgtgcgtgacgacgactcgctgtccgccgcgctggaggccggagcggcccgcgtgaacatcggcaccgccgcgttggagaaccccgaatggaccgcctcggtcatcaagcggtacggcgaccgcgtcgccatcggacttgacgtgcgcggccacacgctcgccgcccgcggatgggtcaaggagggcggcgacctgttcgagacgatgaagttcctcgactcggtcggatgctcccgctacgtcgtcaccgatgtggcgcgggacggcatgatgagcggcccgaacatcgacctgctgcgcgaggtcgcggaacgcaccgatgccaaggtcaccgcttccggtggcatcagcaagctggacgacctgcgcgatatcaagatcctctccgatttcggcgtggactcggccatcctcggcaagtcgctgtacgcccgtgcgttcacgctcgaagaggcgctcgaagtcgcccgctgaccgatacggctgtcgatgggggccgcccccgccgcccgtcaccgtcggctgggcggccggcggcccctgctcacttcttcgcgccgcttttcttcgagcaggggagctcgcccttcttgatgagcttcctgaacagggagtaatcctcctcgttctgctccgcatacgcctgggcgaacgcggctatcgcctggtcgaactcgtcggtgcccccaagatagttggcgatggccacgctgtcgccggtgcgggcatgcgcgtgcgccaggcaccatgcgcacatgcggcccagatccgacaatcccagcgcgttcagatgatcgatgtcgatcgagcccttgccgttccagaattggcgcacgtaatagtcgcgcggccggccgtcctccgccacgaaactcgcccagccgagcagcacgtcggcggtggattggatcagcttctgcccctgcaccacacgctcgccatgcgtcgcatacggcgagcggccgacgaaccgttcgaagaccgactcgttggcctccttcatctgcagcatcagcgggtcgtcaagcccccgtccggtgagaatcgacacccaggcgcgggttccgaccgagccgacgcccacgaccttgcgggcggtgtcatggtaccggtaacggttcagcacgtaacgccggtcctcgtacaggctttgccggtagctgtcatacagtgcgtccagcctctcccgcagcaccccgagatccgcatagtcctgcagctcgctgatcggcaccagctccggcggcttcgagcggaaccgcagccgcttctcgccgctgtcaagataggtgagcttcgcggccgcatggtcggaatcacgcaccgacgcgcgcagcgcggcgtcgcgcaacgtgcggttgcgcttgccgttcaccgtgctttcgtaatggtcgagcgccgcctccacgtcgagatggtcgtaccagacgtcgaggaagtccatctgcgagaactggcggatatggtcgcggtacgagtgcacgcagcgtgcgaccgcgttgcgccggtccttctccttgatgccgttcgcccgcccgcagatctccacggacaccgcgagccgcttcacgtcccattcccacggtcccgtggccgtctcgtcgaagtcgttgatgtcgaacacgagccggtcgctgggggagcggaacatgccgaaattgccgatatgcgcgtcgccgaccgcctggacggggatgccggtggtcggcgtgtgcgcgaggtcgttcgccatgatgagcgcggtgccgcggtagaacgtgaacgcggaatcgctcatgcggtagtacctcagcgggatcagatccggcacccgctgcgccgactgttcctccaaaagcccgatcacgtcgcgccggtgcgacacgatcttccagtcggcgtggctctccaacggtgtggtcttgcgcagcgcgatgccggccttggcctgccccagcggcgtgtcggccatgtgccatgacatatcgatgatgggatggttctcgctcatggctccacgataacgccgacgcgggagcgacattccggcgatgccccggcgtgtccgatggcatgttaacgagtctcgtaacacggacgtgaaaccatgagggattatggataagcagcaagagtttgccctgcgcacggtcgaggaacgcgacgtgcgctttattcggttgtggttcactgacgtgctgggcacgttgaaatccgtggccatcgcgcccgccgagttggaggcggcgttcgaggaggggcttggcttcgacggttccgccatcgagggaatgacgcgcgtgtcggaggacgacatgatcgtgcagcccgacccgtccacgttccagatactgccgtggcgtggcggcccgcagggtaccgctcgcatgttctgcgacattctcacgcccgacggcgagccgtccctgggtgacccgcgccacgtgctcaagcgtgcgctcgccaaggcgaaggagaagggtttcacgttctacgtgcacccggagattgagttctatctgttcgagaaccagaccgactggtcgaaggcgccgactccaatcgacgagggcggctatttcgaccatgtgccgcgcagcccgggcatggacttccgccgcgccaccgtcaacatgctggagcagatgggcatctccgtcgaatactcgcaccatgaggcgggtcccggccagaacgagatcgacctgcggtatgccgacgcgctgaccacggccgacaacatcatgacgttccgcacggtcgtcaaggaaatctcgctggagcgcggcatccacgccagcttcatgcccaagccgctcgccgacgcgcccggttccggcatgcacacgcacctgagcctgttcgagggtgattccaacgcgttctacgaggccggccaggagttcaacatgtccctgaccgcccgacagttcgccgcgggcatcctgcatcatgcggcggagatctgcgcggtcaccgaccagttcgtgaactcgtacaagcgactgtggggtggtgctgaggcgccgagctacatctgctggggtcacaacaaccggtccgcgttgctgcgcatcccgcagtacaagcccggcaagggcaactccgcgcgtatggagttccgtggactcgacccggtggcgaacccgtatctggcgtattcggtgctgctcgccgccggtctggacggcatcgaacagcagatgacgctgggcgagccgaccagcgacgacgtgtgggagctgaccgacgccgaacgtcaggcgatgggcatcgagccgctgccggattcgctggacgccgcactgaaaatcatggagaagtccgatttcgtcgcggacgtgctcggcgagcatgcgttcgagtatttcctgcgcaacaagcatcaggaatgggacgaataccgtggccaggtcacgccgtacgagttgaagaagtacctgcccaagctctgacgtgacgtgaaaccggccgactaccggcaaacaagaaacggtgtggggatgatggctgctgatccggccatcatccccacaccgtttttgcttgccgaaccgaccttcgcaggatgccgctgcggtcactcgaccttgcgcggcgttggccaatggctcattggcctcggattggttcacccatgtgatggtgacgatgatggtgtgacggccctgatagtcgtcggggtccgtcgtcacgtcgtcgatggagacgagggcgtcccgctgtagctgctgatccgcttcatcttgcgcttctccgcctcggtggctttcggggcgggagcgatgtcgtcaggctggacctgctcgtattgcgtgccgctggtcggtgccttgaacgcggacacgatgccctcatggtagcgggtcgcctgattggctacgacgtacaggtcgcccgtcgcgtcgtccagctggtacgcgatggtcgcgtcgctttcctcgcccttggcgatcttgatgtcgtccgactgcgtcttgtacccttcgatggatgagccgccgcggctgtgcaggtaggttttgttcaggccgatgccgctctgatacacctgcaggtccatggcgagctccccgaaggtcgtattggcatcgccggtgttcttccagtggtaggtgatgatcaccgtcttgtgcccgtcgtaatccgtgggccggtggtcgccttggctatggtgaccgtggccttccggttgccgaacgatgtcgtctcgccggttttcacgcgggtcggcttgctgtcttgggagggcgacttgaatgagtacgatgagtcgtccgagtcgctgctgccgcctgtgctgatgatatgactcaccaggtttgatcccagcgcgaacacgattatggcgatgacggcaacccaggatcggcgttggcgcttcgtggctccgccgggtttgcggtcgctcttggactgtacgtgtccgtagccgccgcgatatggatggccgttgcaggacggattgaggggagcgtcgcccgctccggtccgtgccggcccgcctggttcgtctgcgtgtctcgggggccttgcgcggcaggaggtgccgctaatgtatgttccgtctggaagaagagaaaaacagcaggggtacggtcatgtccggttccgccatccgtgggcggcaggggagcgaacgcttcttcacgctgccggccgtcacgctgatcgcgtccagtttcgtgctgggcatgagcgatttcgtggtcgtgggcatcctgcccgacatcgcccacgggttgcgggtctccgaggtcacggtcagcaatccggtgtcgctgttcgccacccatctgacgttgatcggcgtgttcctcgccggcaacatcctgtgtgcgctcgcgccgaattacgcggtgctgccgcattacagccacatggcgaaggtcggttttctgccgcagttccgcatgcgggccggcaatggctgtctcagtgccttgcgtctccgaaccatccccggtagatgatcgagaagttcctgttgccgtagctggagcaggagtctccttccccggctccagcggcgagcgcggcctcattcggctggtagggcgtgtagatgtacagcagtgcggtcgccttgttgccgatgaccacgttggcgccgccgcagctcgtgttcggatggaacctgacgaagttgagcttgccgacatggtaaccgtatgatgcctcatgccgcacgtaatacctgtatcgatgcgccgcgccgtagacctgccggaagaagcctgcgtactgcgggtcgcagtcgttgtcgtcggggcagctcaggcccatggccgccttgaactggaagtcggtcggcttgctcgcggtgacgagctgctgttccttctgcagcacggtaagcagcactttctggctgatgccgcatgatcgcgacgatttgtcgatgatcgtcgccgcagtctctcccttggcgccgtcgtatccgtcgcagtaccggtcatcgggctggtccgtggtgtcgaacgtgcggtttttcaggcatcctgtcccggtgcagtcgccgccgtgctcatcgaggaacgattgcacttcggtgcggctcatcgcatagccgttgaagaactggccgtcggagatgatgttgcccgggtcgaaaccgtatcggtcgcccagattctgctgtcgttcctcggccgtcacgagcgcgatgcgctgtccgacgaacgaggtggtgccccacgccagcgccacggcgcacaccgccgccagcgcggtgcccgccaccgcgaggatgcgcctgcgccatccagcccgcttccaccagcggcgcagcgtgttgcgtcgggtcttcggcttcgggcggcggatcgcggaccgtgccgctgtgccgtgcctggtgtttttggtgttgtttcccctgatgtttttcttggcggccgtaccgggccggcggttgcgttgcttgccgccgttccgtcctccggtccgcccggtgttgttcccctgcttcttacatgttgtcatcgtccgtcattgtagcgcggggatatgttggatgcgcggactggccgtgcgcggcgacgggggagaggccgcgcacagcgctatttgccgagcgttttcttgattcgctgcaagctgaccggcttcgcggtgccaagctcctgggcccacagagagacgtagaactcctccagcatccagcgcgcgtcgtcggcctgtttcgtcagtgcctcatggcgtgggcccgcgggctccgtcttggcacgctgaacggccttgtcgaccagctgtcgcgcctcgtcggcctcccaggcccatcgcacgtcgcggttcttgtcgttcttcgccttggtgagacggatcaggtcggcctccagatactttggtatgcgcggcagggcggcgggcggcgtcgcgccgatgaacccggggaacaccagcgtggcgatatgctcgcgcaccgattgcagcaccgacagcatcggcaggtcggccttgccggaggtcgccttgtcgacattcgcgtacgcgcgcaggatggcgatgacatcatgggcgagtgcgtagacggtgtcctcgtagacctcggtcacccccatcaccgcatcggcgagcgcatcgtcgtcggggagcgtgtcgatgttcggcagcagacgtttgacggtggccagctgcaggtcctccaccagcgccttggtggaggggtatggcgccgacgcgagcatcagcgcctcggtgccgagccaccgagacgagatacgctccgaaggcatgcgcagcgcgtccagggcgccccgccacagcatcaccgcgcgcgactcgctcgtcgccccggccttgtgcagcaggttggcctgttcgaccagtttgccctggctggcggcctgttccgccttgtgttcgaccatgcgccgagcggatgcctccgcctgttcggcgaactgccgttgcaacgcggtcagggatttgcccgaacccagtaccttcaccgggccgcgtgcatgccgccgtccgcgtgcgttgcgcggcgcggggagttgctgctcgatggagaacgtcatccgcagataggcgggcagcttctcccatagttcgccggtcagcacctccgggtggatctgagcgcccacggtgtcgatcgccgcctgggtgaacacgtgcggcaggtcgggccatgcgtggccctggccgtcggacgtgccggtgccgggcagggccggataccggtcgtctatccatgcgcggatcttgcgcgcggtgtccggtgcgggcacgaactgcacgcgcagtgatttcggcagggacttgatcagccccacgatcagctcgtcgagcagtccgggaacgttccatgtgaactgttccggtgtcagacgggacagcgccttgagcggcacgtgcacggtcacgccgtcggcggggtcgtgcgggtcgtagatgtagctgagccgcaggtcgatcggctggccgtccgtgccgagcgcatgccaatggtccggatagtcggcgaggctcaccgactccgccgatgacaggcgttcgaccttgtccgggtcgaaatcgagcagatgcgggtgttcgccgtgctcgcgcttccaccatttcgccaggtcggcgacgcaggtcacgtcattggggatgaccgactggtagaagtcgtagaggtcctcgtcgctgacggactgcgagacctgcctggtgcgactggcgtcctcggccgcctcgtccaggatgtcgcggtttcgggccagaaaatcgtcatagctgaaccgctgctggacgtccccctcgacaaggccctgccggatcaggaagtcgcgggcctccatggggttgatgcgcccccattgcacggtgcggtccgagatgatcggcagaccgtacagcagcaccttcgccgtggcgacggcggagccgcgcgaaccagaccagtgcggctccgcatacgtggtgcgggtcagctgcccggccagcggctcggcccacgccgggtcgatggcggcgctgtacctcgcccacaggcggctcgtctccaccagttccgtgctcatcacccactgcggggtggatttggccacggccgaggccgggaacaatgcgaaatgagtgcctcgcgcgccctgatagtcgttcttcgccatcttctgagcccgcttgatggccttggccttcgccgcgcccttgagaccggcgaaatcggaggccttcggctcgcgcacgatctgcatgcccatcatcgacagcaggccggagagcatcgacgtgtgaatgccgcggtcgtcccacgagcagcacagcgaatgggccgcctgctggttgatcggcagctggcgtaccgtcagatcggggcgggagaccggctgcggggagccgaccttgaacttgagttcgcggcacatctccgtcagctgattgaccaggtccttccactggcgtacgcgcagccagctgaaatactcgctcttgcagatacggcgcagcgcattgttgctcggctcgccatcggcctggaagatacggtcccagatgttcagcgcggtcagatagtcgctggacggatccgcataccggttgtggatgcggtcggcctcatcccgggcctcgtccgggcgttcacgcggatcctgaaggctcaggaacgccacgatcaccagcacggcagccaacgtgtcgggcgtgctggatttcgcggcctcgatcaccatgcggccgagacggacatcgatggggatgcgggcgagctgccgtccgacatgcgtcagcgtcacctcgccgcgcttgcggccgatcgccttgagctccgtcaactcgttgaagccgtcggagaccgccttcatgtccggcgggtcgatgaacccgaaattcgtcacatcctcggccgtacgggcgacgcccaccgacagcatgtgcagcaccacggcacccagcgatgtgcgcaggatctccggctcggtgaaccgagggcgggtctcgtagtcctcacgcgaatacaggcggatggcgatgccgtccgcgatacggccgcaccggccggaccgctggtcggcgctcgcctggctgatcggctcgatgggcagccgctgcaccttggcggtctttgaataccggctgatgcgggccgtgcccgggtcgaccacgtagcggatgcccggcacggtcagtgacgtttcggccacgttcgtggcgatgacgatgcgctgatgcgtgtgcggctcgaagacgcggtgctgctccttggacgacaggcgggcgaacagcggcatgatctcgatggcgtcggggtggcgcatgtcgtcggcgcgcgggccgtaatggcggcgcagcgcgttctcgaactcgtggatgtcgcgctcgccggaggcgaacacgaggatgtcgcgggcgccgcgctcatggctggaatggatgatgagctccgcgcacgccctggcgaccgccgtgggcatgtccatgtcgggttcgcgagatgagccacggtcccggccgccgtcggagggtgccgccgacagttcggcatacgattcctcgccgggcatcgcgccggtctcgaatccgggcacgtgccgcatcagcgcgggcgcagtgcccagcggctcgtagacgacctgcacggggtaggtgcggccggagacctcgatgaccggaaccttctcgtgcagcgcatgctcgaaatgctcctgaaacttcaccgaatcgatggtcgccgaggtgatgatcagcttcaggtcgcgacgtttcggcagcagcgcggtgaggtatccgagcaggaagtcgatgttcaggctgcgctcatgcgcctcgtcgatgacgatcgtgtcgtattgccgcagctgggggtcgcgctggatctgcgccagcaggatgccgtcggtgacgacgcgcagccgggtcttcggcgacgtctcgtcggtgaaccgcacctgatagccgatctcgtcgcccagatggacgcccatttcggaggcgatgcgttcggcgacggttcgcgcggcgagcctgcgcggctgcgtgtgcacaatctgccggccgtgcgtaccgcggccgagctccagcaggatcttcggcagctgcgtggtcttgcccgaaccggtctggcccgagacgatgacgacctggcttgatgacaccgccttggcgatgtcatcgcgagccgccgagaccggcagctcggaaggatatgtgaatttcatccgtttacttgttcctcaacacttcaatgacgcgatatcccttcgcggaatgatacttcgacacctcataatcgtcgcccagcgcggtggcgagccaggggatcagcgagtcggcgcccaagtttttctgcaccaccaggtacgcggcgcctgcggggttgagccgcggcagccacgtcatcagcaggtcgtgcagcgcgtccttgccgatgcggatcggcgggttcgaccagatcgcgtcgaacgccagatcggccggcacctgctccggcgacgcggcatggatgtgctcgcagccgttggacttggcgttggcgcgggtcaggtcgagcgcgcgttcgttcacgtccacggcccagacgtcggccttgggcgaggcgaacgccagcgcaagcgacacgggtccccatccgcagcccagatccagcagcgtccccgtctccggcggctccggcacctcgcgcagcagcaccgacgtgcccagatccaggcgcgagccggagaacacgccgttcgacacctcgaccacggcgtcctgcccgcgcagcgtcaccttcatgcgacggcgaacgtcctcggaggacggttcggcggcgaaatactgttcggtggcgttcccgtcccgcttcgaggcgtccgaggcatgctgcgttttcattcgttctcccgcatatagatgagtgatggctttcgacttggaaccatgatagtcaaaggcatggttagcgggggaggactgcggattcctatgccttcgagagcgctgcgcctcttcgagaatgctttctggcgcaattatccggtagatatctaccgcagtgacattgcgtggtgcacaatgcaattgtcgggcggatggattccgccatcaatggcgaaaggatgggatcatgagtggtgcggataaactgggatacctgattcgtgcgctttcgaggacgaagcgcaaggattacgagaattacgtcgtcaatgccatatggaaccggttggcgatgggcgatgtcaagccggtcacgcaacagctggtgttgtggcctgacgggcgtcggtcgttcgtggacctgtattttcctcaggtgatgatcggggtggaatgcgatgaggcctatcatcagggcaacgggaacgtgaccgcgagcgcgagataaccatcccggacgtgctgcgtcagattcgcggcgaggactatcgggcgttgcatgtggatgtttccggatcgtatgagcaggtggagtgatccatcgacgactgcgtgcggcggatacgtgcagagatcgaacggcgcaggcaggcgaacgagttcacgccgtggacggaagcctacgtcgattacaaggagttctacaagacgagggacgccgtcagcgttgcggatgacgtcggctttccccgaatcgccgacgcggtcaacacgctgtgcggttccgagtacaagagatttcaggaatcctggttcgtccccagcgtgatgcgccaatggtacggcgaccgatatcgagtctggttcccgaagctcgccataggcgggaaggccgtggcaaacggttggaacaaccggctgtccgatgacggcacctatatctacgaatacaacgaggactccgatctggtggatccggtcggcgacgacggcgaccccaatgacatccgtataacgttcgccaagtccgccgacccggtgacgcgggttcaggcgtatcgattcgttggcgtgttccgccggatctcgaacagcgaggacggaacacgaaagcggtaccagcgcatcgaaaccgtcttcccgattcatcgcacaccttgtctgccaatccacagataatggcaagcgtttggagaacgtcgttccgtactcaccatcgtgcatgcgatgcggatcacctgcgatgcggaccacctgcgatgcggaccaccgtggtgtggttcatgcctgcaggggcgtttcgtgtcggatgccgagtgacagatgtcgagtgacggataccgagtggcggatgacgagcagagagcatgagtgacagcagaggtgccattgagccaacagaataccgttgatgcgaatcaggccggtcagccgggcgaacaggaagagccggtgctgaccggtgtgctggccgaccagtcggacgtcctgctggacgagaacggcgatgggcacgtcgggcaacgggacgccgaggagtgggaggagcgcgaatcccgcaaccagctcaagcatgtcgcgggtctcggggagctgcaggacgtcaccgaagtcgaataccgcaaggtccgccttgagcgtgtggtgctggtgggcgtgtggtccagcatgaccaccaccgcggctcaggccgaggagtcgcttcgcgagctcgccgcactggccgagaccgccggagcggtggtgtgcgatggtctgctgcagcatcggtacaagcccgactccgccacatacgtgggttcgggcaaggcccgcgagctggccgacatcgtcgccgtgaacgaggctgacaccatcgtcgtcgacgatgatctgccgcccagccagcggcgtgcgctggaggatgccaccaaggtcaaggtggtggatcgcaccgcggtgatactcgacatcttcgcccagcacgccaccagccgtgaaggcaaggcacaggtggagctcgcgcagcttgaatacatgctgccgcgtctgcgcggttggggcgggtcgctgtcgcgtcaggcgggcggccgtgcggccggggccgacgcgggcatcggatcgcgaggcccgggcgagacgaagatcgagatggaccgtcgcgtcatccggagccggatagccagattgcggcgccagatcgcgcagatggccccggcccgtgaggtcaagcgcggttcgcgtcgacggtacgggctgccgaccatcgccgttgtcggatatacgaacgccggcaaatcctcgctgacgaatcgtctcaccggttccgcggagctggtcgagaacgccctgttcgccacgctcgacactgcggtgcgtcgagcccgggccaaggacgggcgactgtatgcctacgtcgacaccgtcggcttcgtgcgaaacctgccgacccagctgatcgaggcgttcaaatccacgttggaggaggtcgccgaagccgacatcatcctacatgtggtcgacggttcgcaccccgacccgttctcgcagattgacgccgtcaacgacgtgcttgccgacatcgaaggggccgaggagataccgcgcgtcgtcgtgttcaacaagatcgaccgaatcgatgcggccacacgcgagcggctggcggcgctcgaaccggaggcgagtctggtgtccgccgccacgggagagggtcttgacgacctgctgcggcgcatcgaatctatgctgcccgttccgggcgtgcacgtgtctgcgctgctgccctacgacgccggttcgctgctgtcgcgcgtgcgcgaatacggcaacgtcgattccgtcgactatcgcgccgatggcatatggatcgaggcggatgtggaccgccgactcgccgcccagatcgtcgatagggcgatcgatgagacggacggtgatggcagcgatcacatcgatgccgagcatgatgtcgattgagtgttctacccattgccgctgacgcaatgtctgtgagcgttcacaacaatgtgacgcaaatcaccttgccttcggagcgataatgactacggcaatcagcgcaaacgtcatcatgtgtagatacagtaagtgtgttgtcaaaatgaaccccgccaaacacggggcactgtgctaagagaggtctagcaaacatggtggattcacccattaagcccacaaagctcgccatcgtcggtgccggcgcagtcggttccacgctcgccttcgccgccgcccagcgcggtgtcgcccgtcagatcgtcctcgaagacatcgccaaggagcacgtcgaagccgaagtcctcgacatgcagcacggctccagcttctaccccaccgtctccatcgacggttccgatgaccctgagatctgccgtgacgccgacatggtcgtcatcaccgcaggtgcccgtcagaagcccggccagtcccgcctcgacctcgccggcgcgaccatcaacatcatgaagtccatcatcccgaacatgatgaaggtcgccccgaacgccatctacatgctcatcaccaacccggtggacgtcgtcacgcacgtgtgccagaagctgtccgacctgccgaccaaccagatcttcggttccggcaccaacctggactccgctcgtctgcgcttcctgatcgcccagcagaccggcgtcaacgtcaagaacgtgcacgcctacatcgccggcgagcacggtgactccgaagtcccgctgtgggcctccgccaccatcggtggcgtccccatgtgcgactggaccccgctgcccggtcacgagccgctcgatgccgccaagcgcgaggagatccaccaggaagtcaagaacgccgcctacaagatcatcaacggcaagggcgccaccaactacgccatcgccatgtccggcgtcgacatcatcgaggccatcctgcgcgactccaaccgcatcctgcccgtcagctccatgctgaaggacttccacggcatttccgacgtgtgcatgtccgtgccgacgctgctcaaccgtaagggcgtcaacaccgccatcaacacccctgtctccgaccgcgagcttgccgccctgaagcgctccgctgagacgctgaaggaaaccgctgcccagttcggcttctgatatcggattgattgacggggcgccggtgcagatcggcgcatgaaccgccctcagtcttgcttcgcgccttgccatgctggcgcggctgtcggccaggagccggtggtgctctcatcttgcccccggcgggaaggtcatcgagtgaagcgagactgggggtggttttgtttatcggcaggggtcctcctcgtcctggtattcgcccgcatctgctcacagagaacgtcggcgcgccgttcgattcggtgtatagtgaaccctgttgtttgaaaacctcggcttcggccgaggttttcgtcgttctagggctattgaaaatgattgtaggaaacagtttcacatagcaggcagaaggagaggtacactatgccgcacacgcatggaacggtgaacgaggtgacgcgcggcagcaaggcgcaccagcgacggcttatgatgacgctgaccttgaccggcacggtgttcgtggcggagatcgtcggcgccatcatcaccggatcactggcattgctggtggatgccgggcatatgctcacggacatgtcggtgctgattgcatcgacggtgacggcggtgcttatgcgtcgaaagcccaacagctcccgcacctggggttgggcccggcttgaggtgctgaccgcggaggcgggagcgatgatcctgctgttcgtcggattgtatgcgctgatcgaggcggggatgcgactgttcggagaatccgccgaacatgtggcggacagtgggctgctgctgttcttcggcattctgggtctggctgccaatgtcggctcgatcatcatcctcgccgggcagcataacgacaacatgaacatgaaagccgcgttcctcgaagtggtgaatgatgccctgggctcggtggcggtcatagcgtcggccgtggtcatgatgctcaccgggtgggatggcttcgatgccatcgccggcggcctgatcgcgctgctgatgattccacgtgcggtgaagctgttgcgcaatgcgctgaaagtgctgctggaggagaccccggacggattgaatctcgacgaagtacgtacgcatctggagaatatccctcacgtcgtggccgtccatgatctgcatgcgagcaccgtgtccaccggcatgcccatgctcatggcgcatgtcgtggtggaacccggcatgagcatggatcaggcggcgaatgtgctcagccaactgcaggactgtctgcgcgagcatttccccgtctcgattccccacaccacgttccagctcgaaccgcaggggtaccgttcgcccagcgccgaacagctgcactcctgaatgggacgccgcattgcgcggcttgatacgacaatgggttgggtgattgcctgaaatcgggcgattacccaacccatccgtcgtatcgagccgcgagtgtattgagttgcaaggtccgggacggttggctgcggtcagagtcgacgcagcacgctgacgaccttgcccatgatctgcgcgtgggtgccatcgatgggggagtatgcggggttatgcggtatcagccagatgtggccattgtccttgcggaacgtcttgatcgtggcctcgtcgtcgagcaacgcggcgacgatgtcgccgttgactgcggacggctgttcgcgtatgaccacgtagtcgccgtcgcagatggcggcgtcgatcatcgagtcgccgtgcacttcgagcatgaacagtttgccgctgcccgtaagccgttgcggtagccgcatgacatcatcgatgtgctgttcggcggtgatcgggacgccggcggcgatgcgcccgaccagcgggacgtcacgggatgcgagaatcgactcgctggcctccgtgtccccggggaaggggagtaccgtggcggtttgcgagtccgtgccggaatcatacaactcgatggcgcggcccttgttggcgctgatatgaagatagcccttgcgctccagcgcatgaagctgatgtttgaccgatgacgggctcttcagcccgacggcttcgccgatttctcggaaggacggagcgaatccctgttccgcaatgtgcttgcgtatggcatcaagcaccagatgctgcctttcggtcagggcgtcgtcgcgttgccgcgtggcgtttttcgaggtgggtgctggtgtgctcacgtcgactcctttcatcttcgttcaatcatagcgtgatttgttccgtgaaaacaaacattcgttcgatatggcgtgttgcttttgtcgaaccgctgtgtcactatgggtacagttgttctatgaaacatgagttcgagaaggagggcgacatgatggaacaaatgattgaggcagcggggctccagtgtgcatcgagtcgtcatgatgcgatgcgcgatgtggcgttcgatgtcagaaacagcgatgttccaaccttttcgaggaatatggattcttctgatgcgcaacggcgtgattcccgggtgattatcggagtgtgcgacgagcatggtgttcgcatggcgaagaagggtcattcgaccatgtgtttgactcttcgcggcaagatcgtgttctcgatgatgggcgccctgctgtgcctgtgcatgatcggtctgctgatgccgcaggtcgcccggtcggcgccggatccctccgcagtgtacagctataccgtgcagccgggggacactttgtggtcatatgcctcggccatcactcctgatgggggcgatgtgcgcgacaccatcgatgatctgatatcgctcaaccatctcgatggtgtctcgttgcaggtggggcagcagctcaaggtgccgattgtctgattccggcgaattcggagcggtgcgtccccatgagtgctttttcgaatcgcttcttcggcatttaccgccggccgcttccggattcggatgtgaccgttgacatatggggaaggggctttgtcaacgcttacgatattctgaggtcatgcattgtccttattgtcagaattccgataccaaggtcatcgatacgagaatcagtgatgatgggttctcgattcgtcgcaggcgtgtgtgtcagatatgccacaaacgcttcaccaccgtggaaagcaccatgttgttggtgcgcaagcgttccggaaacgtagagccgttcgaccgcaagaaggtggtgtccggcgtgaggaaggcctgtcagggacggcccatcaacgaagacgatctacgcacactcggtcagcgcgtcgaagaggatctgagggcgagggggcttgccgaagtcgattcggacgatgtcggcaaggcgatattggctcctctacgggagctcgatgaggtcgcctacctgcgattcgccagcgtgtatcagaattttgatggtcttgaggacttccagcgagccatagacgatctgcgcaaggaaaagcacgccgaggcggaacagcactgaaacggaacggtgctgaaacggaacggtgctgaaacggagcagtgccggagcgaagcagtgctgaagcggaactgcgctggtcgaaactgcactgacacgaatcaatgttgatgtcgatgccgacgtcgacatgtgacgcctgatatgcgaccggccccttccgtgatcgaacagcggaaggggccgtgtggaaagccgatgaccggcttgttcagctgatcacgcgcatgcgaatcgtgccctcgatgtggctgagcgcgtccagcgtggtctggctgggcttctgcgatacgtcagtgaccacgtagccgagttcgccctcggttccgagagactgcgcagcgatgttgatgttctcctcgcccagcacatggttgacgcgggcgagaacgcccggcaggttggcatgcaggtgcgcgattcgagcagcgctcttgcacggccccaacgtcacctggggaaggttgaccgaaagcatggtcgaccccttgtcccagtagtcctcaagtcgctgcgagacgaaatgaccgattgacttctgcgcctcaagcgtcgagccgccgatatgcggggtgagaatcatgttgtcctcgtcggcgagatcggtgtcgaacggatcgccgctcttcttcggctcgacggggaacacgtcgaccgcggcaccggaaagatgaccggaatccagatgacgcttcaacgcgtccaggtcggcgacgaagccgcgggacaggttgatgaaaatggcattctgcttcatgcgggcgaactggtcctcgccgaagaagccagtgttggacttgcggccgtccacatgcagggtcaccgcatcggactgctccagcagttcgtcaagggtctcgcaacggtgggcgttgcccatcgccagcttctcctcgatatcgtagaacacgacgcgcatgcccagagcctccgccagcacggacaactgcgagccgatattgccgtatccgatgatgcccaaggtcttgccgcgaacctcatgcgagccggaagcggacttgtcccacaagccatggcgcatgtgatgcgtgtgggcgggaatgcggcgcatcaggcagatgatgtcgcagatcaccagttccaccacggaacgggtgttggaatacggggcgttgaacacgccgatgccatgcttgcccgcataatcgagattcacctgattggtgccgatgcagaagcatccgaccgcggtcagggacgggcaagcgtcgatgaccgctgcggtcacgggcgtcttggaccgtatgccgagcaggctcacgccgtcaagcgcctcgatgagttccttctcgcccagggcgcccttgcgcgtctccacttcgaaaccgtgatcgcgcagcgattgcgccgcatccgggtgaatgttttccaataacagagcttttgccatggtacctaccttatagctgcaaagccgtttcgtcttcccctgtccgcactataaccaatcgctgcgttggtctggtcatagccacgtagagatccgaagccgccaccaggcgcgagggagcatcctgctcgatacgtcctggctgtacgaccactacggcgtcgaattcaagtcccttgaccgactccgtggaaccgacgctgatctgcgcgtcccactcgtgctgctcggacagccggttcgtctcgtgctgtcccagcgtacccggaagcgttgaaaagatagtggatcggagcggatcgagcatgtgggaaggggcgatgaccgctacgcgaccggttccgtccgcatccacgaactgcttggctagctgtgcgacatgcgatgccgcggtcgcaatcgtgtcggattcgccgtcgacgatgatcctgcgcacggcgtccggtatcgtgcgcacggcgttgaccgtcgagatatacagtcccgccttctgcgcgaagtccgaggccaggtccgaaacctcctgcggattgcggtagttgatggtcagctcgttgagatcccaccgccgctcgccgaacagccggttcatcgtgcggtcccagcggcgcgtgccgccgagcgcagacgtctgagccacgtcgccgacgatggtgaacgagcgcgacgggcaccggcggatcagcatgcgccagtccatcgcggtcagttcctgagcctcgtcgacgaccacatgcccgtatgtccactcgcggtcggccgcggcacgctgtgcgatgaactcgccgccctcgccgttcatctggtcgaccagcatctgcgaggagacgatgcccgacccgagacctaccgagttcagggtgtcctgcgcgaactgctcctcctgggcgcgcttcgcgttcttggcggcgatctgcgccgcgatcttggggtcgggccccagaagctccatggcctcgtccagcagcggcacgtccgattgcgtcatcggggcgcccttggggcgggtgagcgcggcgatgccgtcgtcgtcaagccacggcgcgagtgcgcgaagacggagcggatgggaccacaggttgtcgatcagccacgtgccgttcatcggcagccacgcgaggttcagcgcgaccctcaccttgtcgttcaggcgaaggttcgtcagcgcctcgttcagctcgtcgtcggacggcgtatagtccagctgctcggcgtaacggtcccgaagcgccatcagcatggtccgcacgaaggtctcccgcgccttgttgtgaggctggcgcgtgcgcttcgcctggtcgatggccgccctgacatcagtgtcgagcatgcggaccgcgaagccgttcacgtgcacggtgggcaggtcctgcggaacccgttcgcgcagcgcgatggcgttggccacgacctgcgccatgcgacggtctcccttgagcttggcggcgagcggcgtgtccgtcgcggtcgccttgatgcccgggatgaggtcggcgatggtgcggctgacgacgcccgtctcgccgagcgagggcagcacctggtcgatgtagcgcaggaacgtcgtgctcgggccgatgaccagcacgccggagcgctccagcttgcgccggtgcgtgtacagcaggtatgcggcgcggtgcagcgcgaccgcggtcttgccggtgccgggcccgccctgcactaccagagccctgttgagatctgagcggatgatgcggtcctgctccgcctggatcgtggcgacgatgtcagtcatcttgccggttcggcgcgaactgagcgatgccagcagggcgccttcgccggtgagcgtcccggccttcgaggccttgtccacctgctcggaatggacgtcgagcacctcgtcctcgatgccgatgacatcgcggaagttcagtgtgatatggcggcgcatgacgatgtcgccgtggttggatggcgtcgcctcgtagaaagggcgggccgcctcggcgcgccagtcggtcagtatcggctcgtggttctcgctggacaggccgatgcggcctatgtaccggcgctcgcccttcacgtcatcgagtcggccgaacaccagacggtcttccatggcgcgcagctgggtgagccggtcctcgtacatggtggcgaacgagtcgcgttccgtgcgctgggtgggggacccgtgcgagccggccgcacgtaccgtatccaaccgcgtgcgcgtctgcgatcgcagggcgtccaagcgggcgtatgcgcggtcgaccgcttgctgttcctcgtgcaattgcgttgataatcccggcattgatgtccgttctctcggtgaaaactcaggcattcaaatgtagcgcaagggcaatacgaagccgtgtggatgtgtcctgccgcaacggcgctccgaagcggttgtggaggatacgcattaaaactatgtggaaaaaccatttcgtggggatttgtggtgagaagtggggtacagtggtggattggtgtatccggattcacggttaggaggtggaacgttggcagacgactcgcaagtccagaacgccacgaacccctccgcacagccggagccgatggccctgcccccgctgttgctgggcacgtacaccccgaaaatcgacgcgaagggccgcatggccctgcccgccaagctccgttcccagcttggcgcgggactcgtcatggcgcgcggccaggaacggtgcgtctacctcctgccgcaatcggagttccgtcgcatcgccatccagatccagcacacgtcgatgggtgacaaggccgcacgcgactacctgcgcgtgttcctgtccggagccgtcgaccaagacccggacaagcagggacgagtgctggtaccgcagatgctgcgcgactacgcgaacctcggcgacgacatcgtggtgataggcgtgggcacccgcgccgagatctggaaccgcgaggcttgggaacgatatctgaacgagaaggaacaaggctatgccgacatagccgacgacgtgcttccggtggtgggattctgatgactgattatgcttcgattcaccagccagtactgcttgagcagtgcgtgtcgctggtcgccccggcgttgcaggaccccggatccattgcggtcgactgcacgctcggtctggccggccacaccatcgccttcctcaaagccgcgccgcaggcccgcgtgctgggcatcgaccgggatgcggaagcactcgccatggccaccgagcgcatcgccggggaaggactttcggaccgcttcatacctgtccacgccgcattcgacgcgttcggccaagtgcttgacgaccagggcatcgatcgggtgaatgcggtgttcatggatctggggctgtcgagcctgcagatcgatgagacggaccgcggcttctcctacgcgcacgacgcgccgctcgacatgcgcatggacgtcagccagcccctgaccgcgcaacgcgtcctggccgagtaccccgagcgcgagctggtacgcatattccgcgcatacggggaggaacggttctcccgccagatcgcccgcgagatcgtgcgccgtcgcgcgcaggaacctctgacgacgtccgcccagctcaacaggctcgtcgacgaggtggtgccgcaggcgcaccgtcccgcaggaaaccccgccaagcgcgtgttccaggcattgcgcatcgaagtgaacggcgaactggacaagctcgccggcaccctgccgcagatagcctgccggctcgccccgaacggccgcctggtggtcgagtcgtatcactcattggaagacaagacggtgaagtcgttcatgaacgaaggactgcgcgtggacgcgccggccgacatgccggtcatccccgacgacgcgcagccgttcttcgcgccgctgacgcgcggcgccgtccagtccgggccggatgagatcgcagccaatcccaggtcggcgtcggtgcgcctgcgcggcgtcgagctggtcaggcccctgcctgcgcgctggcgccagcgcttccggcaggacgcgcaagtcgcccgggaccatgagtcggcccgggacgcgggtgaaaaccgcggcagacacggcggccgcggcagacatgacgacatgacggcacgaaacacgacatcgagaaggaggggatgatggcctcgacattgcgaaccgcccgctccaacgcggcgcccgtggcaccggcggggcgcggctcggatggcgccgcacgccccgccgcccgcccgcagctgcacgtcatcgacggctcctcccagcgcaacggctcccggtccaccggcagcctggcccgtatcatcgcctggacccaggcgcgcggcgcatcactgatccacgtcacggtcgccatcgtcttcctggtcgccacgctgctgataaccctgatgctgcgcacgcagatggttcagaactccttcgaatccaacacggtgcaaaaaaacatcaacatgctcacccaggacgtgcaggacgatcaggcgaaacttgacgagctgatctcgtcgctgcccgacaaggcgcagaagatgggcatggtgccccagcaggattccgtcaccatcgatctcaacgggtacaaacccagtaaggggtccgctcaatgatcggccgaataaccgcaatgatacggttcgccagatgccgcaagttcctcttccagtgcatctccatcggcgtcatactcgcgatggtcgcctccgcatgcctgttcaagctggcctccatccagctgatagacggccagatggccgcacaggcggcgacccaggcccggaccaagaaggtgatcgtccactcgatgcgcggcaagatcaccgacacgaacggcaccgtgctggcgcagagcgtcgagcgatacacgatcatcgccgacccgtgggcggcctcgcagttcgagccgatcgactgcgacacgcagaaggcgaagcaggccggattctgccacaaggtcaacggcaagccggtcggggtcaagggatccgcgggcgtggcccgtctgctggcacccgtgctgaagatggacgcgaagacgctcggcgccaaactgaccggcaccagccggtacatgatcctgaagaaggacgtgacgccgacggtcaagcgggccatcgacgacctgaatctgggtggcgtggtctatggcgagttgagcagccagcgcatctacgccaacggcacccagctcggcgcgctgctcggcggcgtggacgattccggcaagggcgtcgccggggtggaaagcatggagaactccgcgctgaccggcacggacggttacgtcatctaccagcaaggtaacggcggcgaggagatccccggcacgctgaccggttcccaagaggccgtgaacggctccgacgtggcgctgacgctggaccatgacgtcgactggtacgtcaagcaggcgctgctggaaggccagaagaagaccaaggcgacgtgggccatggcggtggtccaggacatccagaccggcgagatactggccctggaggacaccgacgaataccaggcgggtagcgaccaggccaagctgaacgcgtctcgcgccgtcagcgaaagcttcgaaccgggctcggtgggcaaggtcatcacgatgtccggactgctgcagaccgggctgcacaaggcgaccgacaagttcactgttccctattcgtacaccaaggacgggcaggaataccatgactcgtccgtgcacggcgacgagcactggactctggccggcatcatcaagaactcctcgaacgtgggcgtggtcatggcttcgtcgcagtacacgaagaagcagcggtacgagtacctcacgaagttcggcatcggccagtccagcggcatgtccatcccgggcgagtcgcgcgggcagctcggcacgccggaatcgtgggacgggcgaaccagcaacacgatcctgttcggccagggatactccgtgaacgcgctccagctgaccaacgtcgtcgcgaccatcggcaacaagggcgtgcgcaagcagcagtcgctgatcaagtcggtcacccacgccgacggcacggtggagacgccgcaggagggctcttccacgcgcgtcatcgacgagtcggtcgccgaccaggtcaagaacgccatggaatccgtggccgagggatacagcaaggtggtgaacgtcaagggataccgcatcgcggcgaagaccggtaccgccgaggtcgcgggaagcgacggccggctgacctcgatcgtcgccgatttcgccggaatgatcccggcggacaacccgcgcttcgccatcaccgtgatcatgaaggacccgcagggcacctacggcggcatgacggctggcccggtgttcgccaagattggtgaattccttatgcagaagtacaacgtgccgacctccagcccgcgcaacgatgctattgcagtggactggtaaggggccgcgccggaaatccggcggggcgtcgacaaggaacatacggaagaaaggcggaagcgatgagcgcagtcagtgaagccgtcgcgcggcggatgacgttgggatatctggccgacacgtacgggctggaactcgacccggacttcgcttcgggcgtcaccgtcacatccatcgcggacgacgtcgattccgtggctcccggatccctgtatgttcccgcgcagagcgtggacgtcaagcggctggaggaggcccgggcccgcggcgcgtacgctgcgctggtccccccgtcgatgaagcacgaggacggccccgcgcagatgccactactgcgcgcgcgcctgacgttacggcagctgggcgacatcgccagcgacatcgcgggcaccccgtccaacgcactcgccattttcgtggttggctcggatgacccgaaacgcagtgaacggtacgcgtcatgcgtagcggatttcctgcacatgctgggcaatcctgtcggcgtcgtgaaatcatccggctcgacgtcgctggagcgcgagctcgacctgacctacccgctgtcgatactcgacgtgcagcagacgctgtcggtctgcgcggaggacggcgcggcggcgatggtgttcgcgctcaacgaccgtacactcaaatccgatgcgctgaccagcgtgaacgtcgacgtcatcggcctggactcggcacgagacctgcgccagccgacgccgagtggcaccggcgaggattcgcgtgctggcgaaggcggcgaagcggcatctccgtccgggcagtgggcgagcggggaggagcccgccgggtcggctggcgacgcccgggacgatctcgcacaggcgcggcagctgggggcgggcttcggcttcgaggtcgacgagcagacccacgtcgcccgtgccgacgcgcaatccgacctgctcgcggcgcaggccccgttcgcctcggaccgcgacagtatccgtgaattgtcgctcgccattgccatggttatggcggcggggattcgcagaaacaacattcgcagtgcgctgcgcgtatctcacgaattggctcatggagaggaaaacaaggcatgaacgcagaggcaacgatgatgcctatgaccgttcggcaggtggccgaggcggtccaaggcaggctgatcgtcccgcagacgggcgacggcgtcgaagacggagccaatgcactggccacgtcggcggtcagcgattcgcgccaggtccgtgagggctccgtgttcgtggcgatcgccggcgagcgtgtggacggtcatgatttcgtcgctcgcgccggtgaatccggcgcggtcgtggcgctcgtacaacatgaagtggacgcgccggtggcgcagatagtcgttcccgatacggtcgacgcgctgggcctgctcgcgaaggcgaacatcgccgtgcggcgtgcggtcggaacgccgttcaccctgatcggcatcaccggctcggtgggcaagaccaccaccaaggacctcatggccgccctgctgtccacgctcggccccaccgtggcgcccgtcggctcgttcaacaacgagatcggccttcctctgaccgcgttgaaggtcggccgggacacgcgcttcttcgtcgccgagatgggagcgagccatgtcggcgagattacgcgcctgaccacgatcgcccctccggacatcgccgtcgtgctcaaggtcggatgcgcccatctcggcgaattcggctccgtcgagcgcatcgcgcaggcgaaaagcgagatcgtccaggggctggttcccgatgggctggcggtgctcaacgccgacgacgcccatgtggcggcgatggcccccctggcgccgcaaggacacgtattctggttcggcatggccggcgacaacgccgaagccagcgccggcaacgccgcatccgggaagtcggacgcactgttcgccagcgacgtgcggaccgacgacggcgaccgcccctcgttcaccttggaacgggccgatggcggaaccgcccatgtgcaactggcgattcgcggcacgcacaacgtgatgaacgccctcgccgcggcgagcgtcgcccacctgctgggcgtgccgctgcagtcgatcgccgagacgctgtcgcgtcagtcccgcatcagcccgcaccgcatggcggtgtccacggtccggcgcggcgggatgtctttcacgctgatcgatgattcattcaacgccaaccccgactccatgcgagccggtctcgacgggctcgcccggtggcgttccgatgcagacccgtaccgtatcgcggtgctgggagcgatgctggagctgggcggtgacgagtccgcgctgcatgagggcatcggcgagtacgcggccggcctgcccatcgacgccgtcatcgcggtgggcaacgatgacgagcatttcgacgcgctggcttccgcccttgcgaagggcgcgcggaagcggcgtgacgacagtgacggcaacacgccggaggtgcattgggttcacgacatcgatcaggccgacaccttggtccgagctcttgccggagaccatgacgacacggttgtgctgctgaaggggtcacacgcctcgggcctgagcgccctggcgcaacgatggacgacagcggacggacagccgtccgaccacgaataggaagcggggaatctgagttgatcgcgttaatcattggcattctggtctcgcttctggtgaccatcgcgggcacgccgatgctgatccatctggtgcatcggctgcactacgggcagtacatccgtcaggacgggccgaagtcgcatctggtcaagcgcggcaccccgaccatgggcggcgtagcaatcgtgctggcgatcgtgctcggatggggggcgtcggcactgtaccgttacgtccgctcgggagcggttccctccctgtccgcgatgcttgtgctgttcgcgatgctgtcgatgggcctgctcggcttcatcgacgacttcgccaaggtgcgcaaaaaacagaatctgggcctgtcggtgcatgccaagttcatcggccagttcatcttcgccacgatctacgcggttctcgcgctgatcatccccaccaaatcggggttccccagcgctcaggcaggcatgagcttcattgagaagccgttcttcgacttccggttcgccggcggcgtggtcgccgcgatcatattcgtcatctgggtgaatttcctcatgaccgcgtggacgaacgcggtcaacctgaccgacggccttgacggcctggcatccggttcgtcgatgatcgcgttcgccggatacgccatcatcgcgttctgggaaagctaccatatcaagggcggcacgcacgaagggttctcgtatgcggtgtccgatccgctcgacctgaccatcatcgcctgctgcgcggccgtcgcctgcttcggattcctgtggtacaactcgaacccggcgacgatcttcatgggcgacaccggttcgctggcgctcggcggcctgttcgccgcgctgtccatcgccacacacaccgaattcctcgccatcatcatcggcggcctgtacgtaatcgaggtgatgagcgacatcatccaggtcacctcgttcaagctcacgcacaagcgcgtgttcaagatggcgccgatccaccatcatttcgagcttctcgggtggagcgaatcaaaggtcgtcgtgcgcttctggatgatcgagttcctgttcatgatcgtgggcctgatgatgttctacgtcgattgggtgtcccgatccgggttgctgtttgtctgaacggtaccgtgacggctccgcgccgcacagcgtggcgtgaccgccgcggtataggcaggttcgcatgagagcgtccgccggttcggcggcgcaatgacaagggagacgatatggatctcagtgacaagaccgttctggtggccggtctgggtatatccggccgcagcatgatggaagtgctgcgttcccgcgcagcgcgggtaatcggcgtggacgagcataagccggaggccgacctgcattcgttcgacgacatcgactgggattcggccgacatcgtcatgacgtcgccggtgttcaacccgcgcacgccgttcatcctcgaagcccaacgccgaggcatccccgtgtacagcgaggtcgagctcgcgtggcggctgcgcgtggacagcgcccgcaccggccaccccgccccgtgggtgggcatcaccggcacgaacggcaagacgtccacgaccgagatgacctcggccatgctgtgcgccgatggcctcgttgcaccggcggtcggcaacatcggcaaggcggtgtcccacgccgcggtcgatccggacaacgacgcgctgtgcgtggagctcagctcgttccagctgcatttcaccgattcgctggcgctggattgcgcggcgatcacgaacatcgccgacgaccatctcgactggcatggcggcatcgaagcgtacgccgccgacaagtcgaaggtgtttcgcaacgtcaggcgcgccctggtgttcaacgccgacgaccggcgcgtcagcgcgctcgcctcggcggcgcataccgccgagggatgccggcgcatcggattcacactcggcgttccccagcccggccagatcggcgtggacgacggctggatcgtcgaccgcagtggcgtggccggcggcgcattcggcgatgagacccgcctggcgccggtccaggagttcccccacctgtgtgagccggacggcaccgtgtacccgcacctgctcgccgacgcgatgaccgcgctggcgttggcgctgggaatgggcgtggacctcgataaggcgttggccgcgctgaaggcgttcgcccccggcggccatcgcatccagaccgtggcgacggcggcgacgggcgacggcggctcgatacgcttcatcgacgattcgaaggcgacgaacgcccacgcggcgcgggcgtcgctgagcagcttcgcccccaagagcgtggtgtggatcgccggaggactcgccaagggaagccgtttcgaacagctcgtggcggatcaggcgcatacgattaaggcggccgtcatcatcggcaaggaccagaagccgatgcttgaggcgttcgccgccagcgcacccgacattcctcttaccgtgatcgagcccgagccctcggacacggtgatggcgcgcgcggtcgatgccgcaggcgcatacgccggcacaggtgacgtggtgctgatggcacccgcctgcgcctccatggaccagttcgtctcctacgcggaccgcggcacccagttcgcgcgggagtcctcacgatgggtgacgcagcatggcaagtgacgatccgcggcgacgcgcccgctccgtaagatccggccagccttcgcggtcggatgctggttccgcgggcgcgggcactggcacgggcagacgcacggggcaggattcgtccgcctcccgactggccgaggctcggcgggtcgaagagcgtgacgcccaacggctcggcaggttcaccggactgcgcagtctgctcaacccgctgtggtgctaccacggcttccgggccgccgttgtggtgctcaccggcttcggcgtgatcatggtgttctccagttccaccgtgtcgatggtctccgccggccgatcgccgttctcgcaggccatcagccagggcatgtactgcgtgatgggtctggtcgtgggcgtggttttcatgtgccttccggctcgtatgtacaggcgtttcagcttcgccgtggtgttattcgcgatgctgctgcagctgctgacattcacgccgctcggcgtcgaggtcaacggcaatgccggctggatcggcaagcgcggcgtgttcacgatgcagccggccgaggtgatgaagctcgccttgtgcatatggcttccggcggccctgcactgggcgaagaaacacagcggtaagatcggcaagttgcgggcatacgcccccctgacggttctgtatctcctgtgcctgggattcgtgatgctgggcaaggatctgggcacggccatgatcgtcctgttcatcggattcgtcgcgtttcttctgggaggatatccaggcaaggtccttgcggcctttgccgccctgggcatcatcggcatcgtgggattgatcgcatacagtccgaacaggctgaaccgcgttctggccgcgtaccaggagtgcagcggcaccgatgcccaaaaggtctgctaccagtcgatacacgcgaaatacgccttggccgaaggcggtctgttcggggtaggcttgggcaactcccgcgagaaatggaactatctgccggaggcgcacaatgatttcatcttcgccatcatcggcgaggagaccggtttcatcggagcggccatcgtcatcatactgttcgtggtgctgggaggatgcatgatcagcgtggccctgcagaccgcggaccgttacgcgtcggtcagcctgctgtgcatcaccgtatggcttgtcgggcaggcgctgatcaacatcggcgtcgtggtcggggtttttcccgtcatgggcgtgccgatgccgttcgtctcggcgggcgggtcgtccctgatcatgtgtctggcggcggccggcgtggccgcctcgctcatgcgcgcccaacctcagatcaaggccgattcgtcccgcgcctgaccggaggcggggctgtcggcgaagccagctggggtggccataaggccctgccaacagggcgaaatatgtcaaagtcggcttgacgaagccgcgttttttcatcactcacgctaagctcggagattatgagttcatcacctgtgcatatcgttctggcaggcggcggcaccgccggtcatgtcaacccgttgctggccgtggcggatgcgattcgccgtatccggcccgaggcttccatcagcatcatcggcacggccgtaggactggagcacgaccttgttccccgcgctggctatgagctggacaccatcgaaaaggtcccgttcccgcggcgccccaacaaggccgcgctccagtttccggccaagtggatgcgcgagacccgcaaggtccgcgatatcctgcgttcgcgtcacgcggacgttgtggtcggattcggcggctatgcctcggctccggtgtattccgcggcgcacaggatgggcatacccgtcgtcatccatgagcagaacgcccgagccggcatggccaacaagctcggcgcgcgttacgctgcgttcatcggtacggcgtacgagaacaccggcctcaagccgggatccgggtgccgtatggagcgcgtcgggctgccgttgcggccggcgatcagcacgctcgcggcgcagttcgcgtccgatcgcgcgtccgtgcgccagtcgggggccgaggcgatgggcatcgacccggcgcgtcccatggtgctggtcaccggagggtcgctgggcgcggtcagcctgaacagggcggtggcatccagtgccgcggtgctgctcgaacacgcgcaggtcgtccatctgaccggcaagggcaagatcgacgaagtgcgctcgttggtgggagagcgcgccgatgccggggtcttcaccggtgtgggccctgattcatacggcaagggcgactatcatgcggccgaatatctggaacgcatcgatctggcgttcgcatgcgccgacctggtgatttgccggtccggggcgggatcggtgtccgagctcgccgccctgggcctgcctgcggtgtatgtcccgttgccgatcggcaacggggagcagcggttcaacgcgcttcccgtggtcaaggccggcggcgggctgatggtggccgacaaggatttcaccgcgcagtgggtgcaatcccatgtgccgtcgctgctcgccgaaccggaccggctgcgcgagctgggcgacaaggcatgggagtacggcattcgcgacgccgccgacaccatggcccgtcgcgtgcttgaactggcgtaatgcggcgctctgattggcgtcgggtatgaccataatggtgaccagcatgaatcatcaaggagaatctgcagtgtctgaagcgcaaaccaatgccacccctatcgtcctcgacccgatgagggtcgcgttcgcgcccgacgcgacggtgttgcaactgggaaggacccatttcatcggcatcggtggcgccggtatgagcgtgctcgccgaaatgctccatgagcgtggcgtcgacgtcgacggttccgaccgtgaggaaggctcgaagaccgaacggctgcgatccctcggcatcaccgtcgaaatcggccagcaggccgacaacgtgcgtggtgccgacaccgtggtgtactccagcgccatcaagcccgacaaccccgaaatcgtcgcggcgcacgagcggggcatccgcatcgtgcatcgcagcgacatcctggcgttgctgatgaacggccgccgggcggtcaccgtcgccggagcgcatggcaagaccacgacaagttcgctgctatcccacatcctcgtccatgccggaaccgggaagctggccgatcccagctacgccatcggcggcaccatccaggcacccgggggagcggtactggacggcgggcatgccggacgcggcgacgtgttggtcgcggaggcggacgaatccgacggcagcttctgcaagtaccgcccctcgatcgcggtgatcacgaacgcgctcgcagaccatctcgaccattatggcgacgaggcgcattactgcgccgcgttcgtcgaccatgcggggcatgcaagcggacatgtcgtcatgacgggcgatgacgagggtgccgtggccgtgctgcgcgacctcgacccgtccgtggcccgtcgaacgatcgtgtacgccaccaaggatgccgatcagatcggggacctgcgcggcgccacgctggtgcgcatcgatgccgagcatgagagcgccgacagcggccgggagaccttcaccgtccgtgtgccggcgtcactcgcgtcggtctgcggctgtggcgacgccgatctggctttgccggtcagcctcgccatccccggcatgcacaacgcgcgcaacgcgaccgcggccatcctggccgcgatgctgttgggcgtgacacccgaggccgcagcccaggccgcctcgacgttcctcggagcctcgcgccggttccaggtgcgcggcgaggagaacggcgtgacggtggtcgacgattacgcgcatcatcccacggagatcagcgcgctgctcgatgccgcccggcgccggtacccgcgttccgtcatccgggtgctgttccagccgcacctgttttcgcgcacgcgtacgttcgcccacgagttcgccgaggcgctgtccaaggccgatgacgtcatcgtcaccggcatcttccccgcacgcgaactgcagcgggacttcccggacgtttccgccatgaccatcgtcgatgccgcgcaggacgtgccgcacgcttcggcgcagggcgacgggacgtggatcagcgcggtcgacgacatgcaggtggcggctcagatgctggcgatgcgctgccgtcccacggacgtggtgttcaccgtcggcgcgggggacattaccgccatgggcgcggtgatcctgcacgcactgggggcccggcacaatctcggtgaccgctgatggcacggcgggtcgtttcctcacatggcgatgccggtcgtgaggccgggcaagggtccggctcgcgcaagccgcgcacgacggcagacagggcctcatcgtcgggtgccgaagccaatcgcgtcaccgtgacacgggaacgccagaccaggaaaaagcctcgcaccgcgtcgaatgacgtgtcccggaaggctgcatccggaaagacgtcgtcggggagaaccacggtcgggaaggcgacgggccggcagatgacgtccggcaggaagtcggaaaaggccttaggaaaggagacttcccgacaggtaaagggcgggaaaacagtctcccgaaaatcgaggttcggaaagacggcgtcccggagcgtttcgtcgtcctcgtcccggtcggtatcacgcgccgaaggtttcgtcgacgcgcgtcgcctgcacagcgaggatgtggtcaagaagacgctcgatgagaacgtcggcgtgctcggcgtggcgacccgtcccaaagtgctggatttcgacgcgcgcctgaaggagcggaagaaggcgggcacccgggtcgccgccatccgcgtgctgattgtgatattggccgcggcgctggtgtccgcgctgatctggcttctgttgttctcatccgtgttccgtttggaaacctcgcagatcagcgtcagcggcggcaacgaatgggtgagcgagaaggatgtgctggatatcgcgaaccagcaatccggcaaatcgctgttcctggtctccgcagacaaggtcagctcgcagctgaagaacatccccggcgtaacccaggcgaacgtcgtcaaacggtatccgcgctcgctggagattgacatcaaggcgcagcagcccgccgccatgctcaaggaaccagatggaaccctggtggcggtcgaccgcaaggcccgcgtgctcaacgcggtgggcaaggcgtccatgaaaggtattccggtcatcgaggtgagctcggtggacaacggtctgaacagccgcgccgtcaaggaggcactgaccatcctcggcggtctgcccgacacgatgcgcaccgtcatcaccaaggtgagcgcgaaaacgcaggattccatcaccaccgagctgagttccggcaaatatgtcgtcgtctggggtgattcgtccgagctgaaactcaagtcggcgatcgtcgacaagctgctcagcgacccgtcgctgataggagacaagcatcagatcgacgtgtcggccccgagccgacccatcatcaaatagcgcgcgtttcgccgtgggcaggacgcgaaacgtgggtgaaaatacgaaaagggccgcatgatcgttggaatcatgcggcccttggagtggagctgcggggaattgaaccccggtccgatgaccgaaccctcagtcttctacgtgcgtagtctgctggccatatggcggtttttctgcccccatcgatgtcgcagacaactgatggcgggcatatccgcagttaaagtccccgaatcaccctgtggctcaatgattcaggcgagtcttctaaacgacgctcagcatccccccaaagacgagagggagtgaacggagcggctgctcactgtttaaccctggcgcgaagctcaggcagcgagagcgaactcagtgcggttagatttagcacttattcttttgcaggggacatccacgagcggaccctgcgttctcggcacgcttccctgcgacgaacaggtcaccgtcgaaaccgatcagccccgatattgaattatcaattcgcattccggttcatggccggacatttcattatatcccagctgctcgaaaaagcaagtcggtcatcagtcggtcacccatacgcgcttggtgccggtctggacgcgcttggtgccggtctggacgcgcttggttcccgtccgcacctttttcgtgccggactttatgctctgcacctgatacgagccgtgatcctcctgccgggtcccggcctggatctgcttgtcctgccagaccttttcgtaccggtagttgtcggggaggcccgacttgagcaggtagtcaccgtgctcctcgaacgcggggtcgttcgcgttcgcagtgaacccgtcgtgttcaaagatggcgcatccggttggcgcctgcacccgttgcgtctcatagaccggccgggtctcccagcgcccggaggggccgccgttcgggccgcttctgtcgggctgtgcagtggaatcgagctgtgcggatttgccgtcggcattgtcggcatcggtgccgtccttacggatattgtccccggttgcttcgttcttgccgccggggccggacacccccccggtttccggagaggttccctgttctccggaggcgacggtgccggccggcttcggtggacgcggcataatcgcgtgttcgttcgcgcttatggtttttttttggggggggtatgccgtggtatgcccaggttcggatgcggtggcggtgggtgcgatagaatccgatacatgaaagtggtattgcagcgtgtgtcgcaggcgtcggtcgatgtcgtcaatgagctgggggatttggatcccacgttcgaccttcagcagatcggtccggggttcctgctgctggtcggcgtgaccgatgaggacggcgatgacgagatcgcatggctggcgcataagattctgcgtctgcgcgtgttcgaggacgagcagggcaagatgaaccggtcgatccaggacatcggcggtgagatcctgtccgtgtcgcagttcacgctgttcgccgacgtgcgcaaggggaaccggccgagcttcgtcggcgcgggcaagccggaacatgccgacatcatgtggatcaaattcaacgaggcgctgcgctccgggggcgttgcagtacgcgaggggcgtttcggcgcccatatgcgcgtcggcctggtcaacgacggcccggtcacgatcgtcatcgacaccgccgaccgccattgaccggtcgggccgcggctgcgccgtcaccgtgcgagagtaccgtcactgtgcgatccctcactgcgtgacgcataacccgcacagcgtgacggttctccagtgtgacggcgtcccgcgtgacggtgcccgtgacgcaacctgtgcaacccgcgcggagtattgccgtgtccgtgtcggttctcgaatatgcgaaaacccgcccgaccggctgccggtcgtaaccggtcagtcaatcgggcgggctttgcggggcggtcagtcagcgccgaagcgccttgaccctatcaggcttccacgggtttcttgccgttttcgagcaccttgtaggcgaagccgacgacgagtacgtagaggcagccgatggccatcacgaggatgccgccgaactgacccgcgacgtcggccgcggcacccatgatgggcgggaagatcgcgccgccgatcaggcccatgagcatcaggccggagatctcgttctgacggtccggacggtacatgagcgcgtgggagaggaacagcgagaacacgttcgagttgccgaagccgacgagtgcgaccgcgacccagaacagccagaccggcggattggtcggcacgagcgtgaagatcgcgaagcagatggcggagagcgtcatgatgatgccgcagatgcgcacgccgagcttgttgctgatcttctggagcacgatgccgccggtgaagcagccgatcatgcgggcgacgaagtacaccatcgtcgcggaggacgcgatggctgtgaacgtgtcgccggtgtgctcggtcaggatgcgcggcgcctgcgcgttgatggcgacgtccacgcccacgtgcgccacgatgccgaggaagcacaggagcacgatgcggtcggagaacagcagcttgaagcagcggccgatggtagtggtgccggcgtcaggcgcgggctcctcgatcttgtcgaacgcgagcagcacgtagccgaggatgccgacgatgaagtagatcacgaacagtatccaccacatgccgacctgcttgccgtcagcgttggtgtaggtgaaggcggagatgctgttcgcgccccacatggcgatccacggggcgaacagggaggcgaacgccttgacgaactggccgagggtcagcgtggaggcgagcttatcacccttgacgaacacggtcagcagcgggttgagcgacacctgcatcaatgtgttgccgatgccgaggaacgcgaaggagatgacgatgagcaccagctgcacggtggacttcatcgggcacagcaggtaggcgatgatcggcagtgccatggcgacgagcgtcaccaggatggaccacagcacggtcttgcgccgcccgatcttattcatcaggatgccggtgggcatggagaagatcaggaaccagaagaacaccatggtggtgaacaggttggcggttccgtcggcgagaccgaactcggccttcacgtagttcgtcgcggtgccgaccaggtcgacgaagcccatgacgaagaaggcgaacatgacaggcaggatcttggcgaatcccgcgttgactggcttggtggtttcgttgctcattgcgatgtttcccttttctctgataatgagctgtgattatttgatcgtcggtgcatcctgcgggcgtgtcactgcgcggcctgcgcgaggtagtcgggcatggtgtccgggtactccggccaggcgccgttggcagtgcagacgtacgcggcggtgttcacggccttgcggtgcgcctcggccagcgtgtcgccgagcagcgtacgggcggtgaacgtgccggagaaggagtcgccggcgccgacggtgtcgacgacctcgacgtgcggggtggccagcgtggaggactcgccgttcttggagatgatggtggagaacgtggaaccgccggtcaggataacgtagtcgaggccgtactcgctcatgaaccagcggcaggcgtcgtcgtcggaggtgccgcggatgtcgaacatgtcgcgcaggagcagcagttcggcgtcgttgatcttgaagacggtcgccgcttcaagcagctcctcgatgagctccttggagtagtggtcaccgcgcaggttgatgtcgaagaacttcattgcgcccggcttggtgtgcttgagcagctcgatgatggtgtcgtgggtctcgggggagcgcagggccagcgtgccgtagcagatggcgtcggcctgctccacgacctcgatgagctggcgggtgagcagcaggtggtcccaggcgacgcccttgacgatggtgtactccgggatgccgttcttcaagctgacctcgacagtggaggtgggccatgcgttgcgctggatgatggagtggatgccggccttctcggcttcggcgagcagctcgtcgccgagcgcatcctcgccgaccgcgctgattgaccagccgtcggcgccgttcatcttcgcgtggtaggcgaagttgacgggggcgccgcctgcgcgctttccgctgggcagcatgtcccacaggagctctccgagagacagaacgatgggcttggtcatgatggtttcctttccgggatggttgctgtggttgttgtgttgttgtgttgctgcggggtcctccgttgtggggaccccgaaatccgtgatgttccgcgggcggtcacgacagttcgaagaactgtgacgggtggtcgaggaactggttgatggctacggccgcggcgccgttcagggcggcgtccgcgggcagggcggacagggtgatggcggtggtgtcgttgagctcgtggatgacgtgcttgtcgatgaccttgtgcacttcgtcgagcaagagctgcccggcttcggcgacgatgtcgccgatgacgatctgcgaggggttgaaggagttgaagatcgtgatgcagccgaaaccgacgtaccgtgcgacccgcttgatcagtgcgatcgcgcgcttgtcgccgccgcgggccagtgcgaacagcgctcggcatgcctgcaggtgggtcatcgtgtcggcatcggcgatcagatcgccttccttcaggatcatctcgtggatcgcgggggtggagcagtagcgttcgaggcatccgacgttgccgcagtcgcacggcttgccgttgatgtcgatgctgacatggccgatttcggtggccgctccgagggcgccgttgatgatgttgccgtggtcgatcacgccgaggccgacgccttcgccgacgaggtagtaggcgaggttctcggtggtgatggtgggatcgaacaggtattgggccatcgcgccggcgcgggcgtcttgctccacgaacacggggacggtgaacgcgttgctgaattcgtggatgaagttgactttctgccatccgcgcatcgaggacacgacggcggtgcgtcccacgttgcgcaggtaggggccggggacggccatgccgatggcgatgatgcgtcggtcggcttcgatcagcgaaccgatggtgtcgtggagctgcatgatcgccgagtcgatggtgtcttcggtgacttggggcagttcctgcacggtcagcggtttgccggcgaggtcgaacacgccgagctgtaccaggcttcgcgcgaatttcacggcgatgacgtggaattctgcggtgtcgagagtgagcccgatggagcggcggttcttgcgcccctcgaaatcgccggtctccttgatggcgccgacttctatgagcttggcggtgatcttggtgatggcggcgggggtgaggtcgagggctttggcgatctgcgcgcgagagctgatgccgtgctggtacaggtgctgcatgatccgcgaacggttggtttcggacactgatgccagggttgcgttggcgatggtgttggtcatcactgctccttcgctgtcgtgccgtgtacgcggtcgttgcgtgttgttgtcatgctcgtcattgaatatgaacgatgtttatatattaacactgttaatcaaaaaaagggaggcgcgccgttgttcggcgtgtcgcgccttgtcccacggtttgcgcgtgtcggggcgtgggatggttcgggtgccctcgtgcgggatggtacggtgatagacaaggtatgtgacgcatcgaaggagatgacaatgacggttgaaatcgcggtgcaggacgtggagggcgcccgcatcgcacatgaggagggggcggatcgcgtcgaactgtgcgccgctctgatgggcacgggcgggctgaccccaagcttcggcatgatccaggcatgctcccatgtcggcgtaccccaaggcgtccaggtgctgatccgtccgagaggcggttcgttcgtgttcaccgatgaagagaaatacgtgcagatcgccgacgtccgttcggccatcctcgccggggcgtccggcgtcgtcgtcggaggcatgaccgaggacgggcgcattgacgtgccgttcacccgcgcgctggccgaggccgcccgcaacgaggccgtgcgctgcaatcgcaaggtgcaggtcacgtatcatcgtgcgttcgacatgctcgacgatcagttcgccgcgctggataccctgatcgaacttggcttcacccgcgtgctcacctcgggtggcgccgcatgcgtcccggatggtctgggccgcctgcgggagctgtccgaatacgccgcggggcgcatccagatacaggccggcggcggtgtgaccgtcgatctcattcccgccttgaaggagacgggcgtgtcggcgattcatttgtcggcgaaacgcacgatgacatcggatgggggccccggaggcggaggcgatggcgtcatggtatgccgcaccgatcgggatgtcgtgcgtgccgcagtcgccgccgcgcgctgaaaatccaaatcctcccgctggcgggaggtggcgcgcagcctgatcagcggttttccaggtaatcgtggaggactgatagggcttcgccacgcagggtgatttcgccctcgcactcgcatcggcggatgatggtccgcgtgtggaacgacgagccggtcagcaggtcgagctgcgcctgcgtggccgacagcagggtgtcgttgacgatgtcgctctgcccgtacacgcacacgtcggcaaggtccagcagtcccacgggcatggacagcgccgtgcccagataggtgccggcctcgcgcaggatgctcgcgcgcatccgttcgtcgctgcgctgcagccgtgcgtgcagcgaggtcgccgagaccatgcgttcgaggcaccctcgcttgccgcaggcgcacggagggccctgcgggtcgagggagatgtggccgatctcgccgccggcgtggttctcgccgaacaccggcacgtcgcccagcagcacggcgcctccgacgccacggcgcaggcggacgaacatcatattggggccgcccttgccgaacagtcgctcggtgaacatggcggcggtcgcgtcgttgttcacggtgacgggaagtgagaaacgccgttcgatgggcgtgcggacgtcgacgttgcgccagccgagcagcgtggagcgcttcaccaggccgttgccgtcgaccacgccgggcatggcgagcccgatgccgatgacgttctgcgtggcggcgtgcaggggagtgatgacctcgttgatggtgtcgacatccacatggttcaccgcccgcagcgcatgttccacgtgcatgaccggctcgccgagcaggttcgcggcctcgccctggatgagatgcggctgtgacaggtcgatgctgatgatatgcagcgtgtcggggtcgacgctcagcagcgtgcctcgcttgcccttgccgccgttggactcacggccgttctcgcgcagcaggtgacagctgagcatgctgttgaccacatcggagaccgccacgcgggacagtcccgtgcgccgccccaattcggcgcgtgaaagctggacgtcggggaacagcaggctgaagatcaatgaccggttcgtgcgtcttgcatcggcgggacttgccttgccgctctgtcccgggttgtgggggccccatatcccggattgctggtaagcggtcataagtccctggatcctttccgtggctctccgcgagaccatttccggtcacgcaatgttcattctacggtcgctcatgttcaatgtccgttgtgtcgccgaagatgcggatatacacattagttagtatcattaacaaatagcggatgcgcatgtcacgggaaacgcaagaatcgcgtgacggcacggctggtcgctgatgacaacggggtggccgaaccgctgaagaatgaacaacacaaggaggttgcacatgcctgaagtgattatcgtgaaggatcaggatgaggccggcgagctgtacgcccgctgcgtcgccgatctgatcaagggcaagccggacgcggtgctgggtctggcgaccggttcgagcccgctggccgcctaccgtcacctcgccgccatggtgaaggccgaggacatcgacgtgtcgaaggtgcgcggtttcgcgcttgacgagtacatcggtctgccgctgacccacccggagtcctaccactccaccatccaccgcaccgtcgtcgagccgctcggcctcgacccggagaaggtgcacgtgcccggtgacgtgctcgacggcgccccactggaggacggcgagcgtatcgcccacgccggccccgagtacgatgcggccatcgaggccgccggcggcatcgacgtgcagatcctcggcatcggcaccgacggccacgtcggcttcaacgagcccggctcgtcgctggcctccggcacgcgcgtcaagacgctggccgagcagacccgcgtcgacaacgcccgcttcttcgacgacgacatcaaccaggtgccgacccactgcatcacgcagggcatcggcacgatcctcaaggcccgtcacctggtgctgctggccttcggcgagggcaaggccgaagcggtcgaggagacctgcgagggcggcgtgagcgccttctgcccggcttccgctctgcagctgcacccgcacgcgacgatcatcgtcgacgaggccgccgcctcccgcctgcgccacaaggactactacaagtacgccttcgagcacaagccggcttggcagggcatctgatcagcgccctgacaggcatatcgatatgcgctcccgaaccggggcgcatgacggatgggttccccgtctgggggacccatcctcgcatggggcggtcatcatcgcgccccgaatcacatacaaagaggtaggacaatatgactcaatcacgagaacagatcgtcgcgcgggtgactgatgcgctgaagggcgaggcgggtcgcgtcgccgttcgcggtgcccgcaaggtggatgcgtgcggcgtccaggatcatttctggctgaccgcggcggacggtgtcatcgtcgccaccggcaccgacgacgaggcgttcgagtcggcgtgtcgttccatcggccttgatccggccgacgagacggccatcatcgatgcggccgggcagctgatcaccccgggctatgtggacattcacgcgcatggcgcatgggagcattccttcgatgacggtccggaaggcatcgacatcgcgcgtgccggccacgccgtgcacggcacgaccaggcaggtgctgtcgctgatcaccaaccccatcgacgtgatctgcgcgaacctgaagaacgttcgcgccaagatggacgagcgccccgacgtgctcggtgcccatctcgaaggtccgttcctggcgctcgcccgcaagggcgctcatgatcccgagtgcctcaaggacccggttcccgagctcgtcgacgagctgctgggcgctgccgacggctgcatccgccagatcaccatcgcgcccgagctgcctcacggcatcagcgccatcaagcagttcacgaaggcgggcgtcgtgccggccgtcggccactgcgacgccgattacgagaccgccaaggccggtttcgacgccggcgcgggcatcatgacccacatgttcaacgcgatgaatggactgcaccaccgcaagccgggcccgatcccggcggccgtggaggatccgcgcgtcactatcgagctgatcaacgacggcttccacgtgcaggacccgatggtcaagctgggcttcgagttcgcaccccaccgcacggcgttcgtcaccgacgcgatggcggccaccgactgccctgacggcccgtacaagctgggtgcgctggacgtgaacgtcgtcgacggccacgcccgtctggtgtcgaacggtgcaatcgccggctccacgctgctgcttgaggtcgccgtgcagcgcgccgtcaatgagctgggcatctccccggtcgacgccgtcgaggctgccacgctggcgcccgcgcgcgcgttcggctacgacaagccgaacgcggtcaccggcgccccgctgggtctgctcgcgcccgggtacgccgccgacctgttgctcaccgatccgtccagctggacggtcaaccaggtgtggtgcgccggccgcaagctgaagtaaggcgcagccgcaaggcgttgattgcattcgtcacgggaaactgtgataggtcgcgatgagggccgtctgcatatgcaggcggccctcatctcatgtacagccttgtcgcccccacctcttccggtctcataatgtgggcattgtgtggcggatgtcgcaaaataccggaatagttgcaattccaagggttattcggccacaagccgcgcccttgcacatcacagccgattcgtatggaaacacatggctaacacaataaccccatagtcttggtgaccgcgccaatgaagacggcgcggagagtagttaaggaagaggtatttcccttgaagaatcatcgcaagtttttggcggctgtcgcatccatcgcggcaatcgcatcgctgaccgcatgcggcggcgtgaaggacgccaatacggcgagcggatccgcgatcaccatcggcaccaccgataagatcaccagcgtggatcccgcgggctcttacgacaatggttcgtatgccgtgcagattcagattttcccgttcctgtatgcacaggattacaatacgtccgaattgagcccggatatcgccgccgatgacggtacatggaatgatgacggcaccgaattcaccgtaaagatcaaggaagggctgaagttcgcgaacggtcatgacctgaccgcatccgatgtcaagttctcgtatgaccgcatcaagacgatcaacgacgcgaacggcccgagctcgctgctcgccaacgtcgaatccgtcgaggctccggacgataccaccgtcgtgttcaaggactccgtgccgttcgatgtgacgctcaagcaggtcatgtccagcccggccggacccattgtcgacgaagaggtcttcgacgccgacaagctgaccgacgccgacaccatcgtcaaggggaacgcgttcgccggcccgtacaagctcaccgcgttcaagatgaacgagaccgcgtcctacgagaagaacgacagctacaagggcctgaccccggccaagaacgacgccatccaggtcaagtacttcgccgacgcgtccaacctcaagctcaacgtccagcagggccagatcgacgtggccttccgctcgctgaccccgaccgacatcgaggacctgtccaaggactccaaggtcaaggtcgtcaaggggccgggcggtgaggaacgcttcctgaccttcaacttcaagatccagccctacggcgagtcccagtccgacgccgacgccaacaaggccaaggccgtgcgccaggccgtcgccaacctcatcgaccgcgatgagctgagcaagaaggtctacaagggcacctacaccccgatgtactccttcatccccgacggactgtccggccatgacgacacgctgaaggccgcctatggcgacggtgagggcaagcccgacgccgccaaggccaagaaggtgctggaggacgccggcgtttcgaccccggtcgacctcaagctccagtacaacggcgaccactacggctcctcgtccgccgacgagtacgccgccatcaagtcccagctggaggccgacggcctgttcaaggtcgacctgcagcagaccgaatggacgcagtacaacaaggaacgcgtcgtcaccgaagactccgacggctcgtacccggtctaccagctcggctggttcccggactactccgatccggacaactacctgtccccgttcttccgcgacggcaacttcgtcaacaacggctactccaacaaggaagtcaacgatctgatcgtcaagcaggcaggcgagaaggacgccaccaagcgtgaggagatcctcaagcaggtccaggccctggagaccgaggacctgtccaccatcccgctgctgcagggtgcccaggtggccgtcaccggaacgaacatcaagggtgtcgtactcgacgcctcgttccgcttccgctacgcatcagtgaccaagtcctgatccagtcccggctcccgccgacgcggggtgacgcccgtgaagccggtcatggatggtgcagttgacgccaagccatccatgaccgccgcgggcgatcccacacgccgcgggagcatcatccgtattcgatcgtttttccccagaaggagcatcgcgtgtccgaaagcgccacggcgtcggcacctgcgaagacgcagccgaaagccaagaaaaaccatttgtccagtgggtttttccgtttcgtattgaccagattcctgctgatcatccccactgtattcattctcgtcaccatcgtgtttttcgtgatgcgtgccaccggcgacccgatttccgccgccatgggcggacgcctgactcccgaagagctgcaacgccgtatccacgccgccggctatgaccgtccgctggtcgtgcagtacctcgactatcttggcgggctgctgcgcggcgatctgggcaccacgctcaccgacaaccagccggtcaccaccatcctgacccgctacggggcggccacgttcgagctcgcgttcctgagcctgatcgtcgctctgatcgtcggcatcggactgggccgtctcgccgccaggcgccgcgaccacgccgccgatgcgggcatccgcgtgttcgccatcctgtgctatgcgacgccggtgttcttcctgggactgatgctcaagctcgtcttcgcggtgtggctcaacgtgctgcccccatccggtcgttccagcttcgccagcgacatgcaattccagaggctggtgtcacccacgggcttctacatcatcgatgccttccagctgggtgacatgagcgtgctggtcgatgtgctgcgtcacgcggtgctgcccgccctcgcgctgggtctgctgaccgcaggcgtgttcatccgtctggtgcgcaccaacgtcatctccacgtacacgtccggctacgtcgaggcggcgcgctcccgcggcgtgtcggagggtcgtctgctgtccaagcacgcctggcgccccgcaatgatcccgatcatcacggtcatgggcatgcagatcgcgctgatgctcgccggcgcggtgctgaccgagaccaccttcgagtggaagggtctgggattcatgctgtcccagtacctcaagcagcgtgacttcgtcgccgtgcagggcatcgtgatcctaatcgccatcatcgtcgccgtggtcaacttcatcgttgacgtgatcagcgcgctcatcgatccgagagtgaggtactgacatgaccgaaagcactgcaaccaaagtcggcgtgcccggcgacaagcggctcggcgacctcaaggtcaacaagccggtgccatggtacggcaagctgccggtggtgcgcgacctgaagatcgcggtcggctggcagaaggccatgctggtcacgggccttgtcatcaccggcgtgttcctgctcgtggcggtcttcgccccgctgattgcgccttacggatactcgcagatcaaggatgcggacggcgtgtcgttcccgacgcaggccgccccctcgtccaagcacatctggggcaccaccgtcggcggattcgacgtgttcagccgcacggtgtggggagcgaggaccgcggtcatcgccatcatcgtcgccgtgctgctgtcgatcttcgccggcgtgctgctcggcctcatctccggatatttcggcggatgggtcgaccgcgtgctggtcgtgatcgccgacgccatctactcgttcccgtcgctgctgctcgccatcctgatggccatcatgatctccggcggccagtccggcctgtggagcggcatcctggcatcaggcatctccatcaccgtggtgtacatcccgcagtacttccgcaccatccgcgccgaagtggtgcgcatcaagggatcggcctacgtcgagtcggcgaaggtcgtgggcgcctccacatggcgcatcatgaccaagcacctgctgaagaactcgacgcgcacgctgcccgtcatccttacgctcaactcgtccgaggcgattctgacgctcgccggactgggcttcctcggcttcggcatcgagccgacggccgcggccgaatgggggtatgacctgaaccgttccgtcgccgacgttacggccggcatctggtggacggccgtgttccccggcatcgccatcgtgctgatcgtgctgggcatcacactggtgggcgaatcgctcaacgatctggcggatccgcgtcttcgtgcccgcaagtccgccggcgaggtcatcggatccatcgaagacacgtccgtcgaccccagtgagaagccgagcgccgacaacgaggtgatcgcggagctcaaatccgaaggcaagccccaggtcagtgtggagaaccctgccatcgcgcaggtgatggaaaaggagaccgaccatgagtgactcgaccaacgtcaaggacacgtccggcaatctagccgaaatcaagaacctcagcgtctcgttcatgaccgatgcgggctccatcaaggccatcgacaaggtgaacttcaccatcccgcgcaagaccgtggtcggcgtggtcggcgaatccggctccggcaagtcggtgaccgcccgttcgatcatcaagctgctgcccgagaccgccaccacgtccggtgcgatctacctgtcgaaccgtgccgactccgaacgtcttgacgtgctgagcctgtccggtgaggatctgcgccgcatgcgcggctccgaagcggccatggtgttccaggagcccaactcggtgctcaacccggtgtacaccatcggctggcagatcgaggagggcctgcgtgcccacggcatgaaagacaagaaggagcgccgggcgaaggccatcgacatcctcaagaaggtcggcatccccgaggccgagacccgcatcgactactatccccaccagttctccggcggccagaagcagcgcatcgtcatcgcgatggcgctggtgctcaaccccgggctgatcctcgccgacgagccgaccaccgcgctcgatgtgaccgtgcaggccgaaatcctcgacctgctgcgtctcgcccgcgacgagttcgacgcctccgtgctgatcatcacgcacaacatgggcgtcatcgccgacatcgccgaccaggtggtcgtgatgtaccgcggccatgtcgtcgagcagggcgatgtggaaagcatcttctaccaccccagccatccctacacccagcgcctgctggcggcggtgccgcgcatcggccagaagctggtcgtgcgcgatgtcggcggcaagccgatcgaccgcacgtcggattggcatgacgagccactggccgtcgaggcgaagggactgacgatcacgtaccccgggcacctgatgcagcccgacttcgtggccgtagacggcatcgacttcgcgatccaccgttccgaagtgctcggtctggtgggggagtccggttccgggaaatccaccaccggccgcgcgatagccggcctgcagaaagtgagcggaggctcgctcaatgtgctcggcgtcgagatgaacggcgtcagggagcgtgatttcaagcccaagcgtgccgacatcggattcgtgttccaagatccgggcagctcgttcaacccgctgatgaccatcgcggagaacgtcgccgaaccgctcatcgtgcaccgcaagtactcgtcggtcgctgacgcgaaggagtacgtgggcgacctgctggagatggtgcagctgccgagggcgtacatgagccgattcccgcacgagctgtcgggtggccagcggcaacgcgcctcgctggcacgcgcgctggcgctcaagccgtcgctgctgatcgccgacgagccgacgagcgcgctcgacgtgtcggtgcaggccaaggtcctggaactgttcaagaagctgcaggttgagatcggattcgcctgcctgttcatcacccacgatctggccgtggtggacatgctcgccgaccgtatcatggtcatgcacaagggacgcatcgtcgagcacggcgacgccgacgacatcatgcagcggccgagcaaccagtacacgaagaaactgctcgcctcgctgccggttcccgacccgcgcgaacagcagaagcaccgcgcccacctgcacgagctcctggccgccgaaaacgcggcctagccgctagccccagcaggattaccggttccgccccgctggcgggaggacacatatcgactccgcgcgaacgtcgtatgggcgggcgtggtgcgactagtatagggaaggaattgtcagtcggttttcgaacgacacaggttttcgaacagtacgaaggagcgtcacacgatgagcgaagtcatcaccgataaggacaaggaatacgaggcccgcgaggaggcgaacgcccccggcgcggatcaggcgatgagcgaccgtgtgaacaaccgttcgctgcgccccaattccagcgccttcattgatttcatgaagaccggttgggacgccagcgaaccggagatcgagccgctcgaatcctcgaagttcacgccggcgcgactcgccgcactgggcaaggcgttcccaggcgagcgtctggtgattccggcaggcagtcccaaggtgcgcaacaacgactgcgattacatgttccgcccggacaccaccttcgcgtactacaccggcctcggccaggattacgaggcgggtgccgtgctggtgctcaaccctctcgacccggattcgcccgaggcgaaggccggcaagacgcatgaggccgagctgttcgtcgccccgcgcgccgacaccgccacgcaggacttcttcatgaacgcccattacggcgaatactgggtgggccctcgcgccggtctcaaggaaatgacctcgatgaccggcatcgagacgcacgacatcgcccagctggctgacgcgctgtccaaggacgtcggggccgaggccggtgcggtgcgcgtgcgcgtgatcagcgacgccgacccgcaggtcacgtcactggtcgaatcgatccgtgagtccaacggctataccgacccggacaagaacaacgcagccgacgacaagctgcacgagttcgccgccgaagctcgcatggtcaaggacgagtacgagatcggagagatgcgcaaggccgtccaggccaccaagcacggcttcgaccacatccttgcgaagcttcccgaagcgctcgacaagccgcgctccgagcgcatcctcgaaggcgcgttcaacgcggtggcccgcgaggagggcaacgcgctgggctacgatacgatcatcgcctccggcgagcacgcgccgattctgcactggatgcgcaacacgggcgtcgtgcgcaagggcgacatgctgctcatcgatgccggtgtggaggtcaacagcctgtacacggccgacatcacccgcacgttcccgaccaacggcaagttcaccgatttccagcgccggctctaccaggcggtgctggactcccagcaggccggcttcgaggccgccaagccgggcgccacgtactccgacatccatcacgcctgcatgcgcgtgatcgcgcagcgcctgcacgactgggggctgctgccggtggacgtcgaggaatcgctgtcgcccgaaggccagcagcaccgccgttggctcgcctgcggcgtggcgcaccacctcgggcttgacgtgcacgattgcgcacaggctcgctacgagtcgtaccaaggcgcgaagatcgaacccggcatgatcttcaccatcgagcccggcctgtacttccgcgaggacgacctgctgattccgccggaataccgcggtatcggcatccgcatcgaggacgacgtgctgatgaccgagaacggccccgaatggatttccgcgggcatcccgaagcagcccgacgacgtcgagcagtggatggccgacatggccgcaggctccaaggcctgattgttccgatacgatgccgcccctttcaacggggcggcatcgtcggttgtacgcaatataaggaggaatgcccatgccaacacccgaattcgtattggagttgcgcaagaagatcggccatgacctgttgtggctcaacggggtcaccggctgcgtgctggacgaccggggccgcctgctgctgggccgtcgctccgacaccggcgagtgggccatggtctatggcatcaacgagcccggtgagcagccggcggatacggtggtgcgcgagatcaaggaggagaccggcatcgacgcggtcgtcacagacctggtcgccgtcacgtcgtcgtcacgcgtgatcacctatgcgaacggcgacaacacgatgtacatggaccactcgttcctgtgcgctctcaagcccggcggcaatgccgagccgtatgtgggggacgaggaaagcctgaacgtgggctggttcgaactggatgatctgcccgagcccctggccgccagcactgtggagcggctgaagctgttccggcgctatctcgacaacaagcgccggggcgacgcccacgcgctgttcgtcgccgacggggtgcagcgctagcggcgggtctgtttgcgtctctaagtgcgcgccgaaacgacaagtgcgcgaacatagggacgcaaaccaggccatttgcgtccctaagtgcgcacggttgtcgtttcggcgcgcacttaaggacgcaaacgagcgctacacggtcgtcataggggctgaccggtgtgacgtgccgtccgtctcactcgtcttccatgtcggcgagctcatgcgccgggcaggcaagcgcaagcacggccgtggtcgctatgaacgcgacgccactgaggatgattgcccgcatgatccatctcctatcgcgtggtcttctcatcggagggccgaacctttccttaccaagtacagcaccatataagagctcgtttcatgggttaggtcatacgaacggtcaatttttggtgacgacttcgtgaattacgccgtcatcgtgcctgcgattggcatcgcaatgacgcggcggcgacctgctggccggatattgccgtcggcatatgacaggacgaccattagaatggcgtaacggaaccattgatgagcaaacgaggtcgatatcagcatgtcttttgagcatccgaaccgcaacaacgagtccatccgcgacgtggagcgcgacatcatgcgccgcccgccggagcacaacaccacgaatctggatctggaccggatgaacctcatgctcgacgtgctcggccatccggagcactcgttccgtgtgatccacgtcaccggcacgaacggcaaggggtcgaccgcccgcatggccgaggccctctgccgggcgtatgggctgcgcaccggcctgtatacgtcgccgcatctggaacgtatcaacgagcgcatcgccatcgacgggcaggagctgagcgatgacgatttcgtggacatgtgggatcagatcaaggatctggtcgccatcgtcgacgcgaagatggccgagtccggccgtcccccgatgagcttcttcgaggtgctgacgtcgatggccatctggaagttcgccgacgcgccggtcgacgttgccgtcgtcgaggtcggcatgggcggcctgtgggacgcgacgaacgtgctggacgcggacgcggccatcatcggcccggtcgatatggatcacatgcagtggcttggcgacaccgtcgagcagatcgccaccgagaaggccggtatcatcaagccgaactgcaccgccatcatcgggccgcagccgcatgaggagcgggtcatgccgattctgatggaggccgccgagcgcaaccatgcgacgctggtacgcgacggctatgagatggaggtcacggaccgcgtgcctgcggtcggcggccagatcgccacgctgcacacgccgaacggggtgtacgagcaggtgccgatcgccaagttcggcgagcatcaggcacacaacgcgctcgccgcgctcgcggccgcggaggcggtcatcccggtcaatgggccgttgaacggcgacctggtcgggcaggcgctgcagggcgtcaaggtgcccggccgcatagagcagatccgcacgtcgccgacgatcatccttgacggcggacacaacgtgaacgcggccgaggcgctgcgcaaggccatcgaggaaagctacgacttcacacagctggtcggcgtcgtcgcgatgatgggcgacaagcaggtggaggagtatctcggcgtgctggagccgatcctgagccaggtcgtcgtcaccgagaactcgtggcgcgaccgcgtcatgccggccgaggaactggagaagatcgccgtccatgtgttcggccgcgaccgtgtcatccgcgaggacagcctgccagacgccatccagaaagcggtcgacatggtggacgtcgaggatgagaccggagtcggctacggccgtggcgtgctggtctgcggcagtttcgtcaccgccggagacgcgcgcacgctgctcaaggagcggatgaacgccgacctcgccaagccgaaggccgagcgtgtcaatccctcggtgggcgagcccgagccgcgcaccggcaccggcgaccctgcacggtccggggtggaatcggacgccgacacggacttcgccaccgacgcgaaccccgatttcaacgagaacgacttcggcaatttcggctttgacaaggccgccaaggaggccgccaaggaggctgacgaggaggcggatgccgccgacggcggtccccagggcggacaggcctagtcgacatgtatctcaaggaactcacgctgcgcggcttcaaatcgttcgcatccgccacgacgctgcgattcgagccgggcatcaccgcggtcgtcggtccgaacggttccggcaagtcgaacatcgtcgacgcgctcacctgggtgatgggtgaacagggcgcgaagaacctgcgcggcacgtcgatggaggacgtgatcttcgcgggaacgtcctcccgcccgccactcggccgcgcacaggtgagcctgacgatcgacaacaccgaccacacgctgaacatcgactacagcgaggtgacgatcagccgcaccatcttccgcaacgggggttccgaatacgcgatcaacggctcggcctgccgtctgctcgacatccaggagctgttgagcgacaccgggctcgggcagcagatgcacgtgatcgtcgggcaggggcggctggacgcgattctgagggccgatcccagcggccaccgcgcgttcatcgaagaggccgcgggcatcctcaagcaccgcaagcgcaaggaacgtgcgctgcgcaagttggcgaacaccgaaacgaacctgtcgcggctcgacgacctgctgagcgagatacgacggcagctcgggccgcttggccggcaggcgcgcatctcgcgcagggccgacagcatccaggtgacgttgcgcgatgcgcagagccgcctgtacgccgacgatgccgtcgccgcgatggcgaagcgcgacgcggtgcgcggcgagctggcttcggtgcgtcacgacctgcaggccgcgcaatcggagctcgcccgggtcaaggtgcgcatcgaacagatcgaatcgctgagcgcgcaatccagcccggcactcgcgcgaatcaaccagacctggcatgagatgtctcagatacaggaacggctgaaatcgttgtcctcactggccggcgaacgcggacggtcgctgctcgggcagctggtgacctctctcggcgaggaccccgacatgctgaacaagcgggcggaggaactggaatcgcaggcgcggcggcagtcggagacagtcaacgacatgcgcatcgcgcttgacaaggcgatacaggagcgcgccgacgacgagaaaaaactcgcctcggtgcgacagaccctggcggagctgcgcaaaagcgcccagcagcgcgacttgcagatcgcgaacctcaacgcgctgatcgcccgcgaggaggcgtccgccgaacttgcagacacacgcgccaaggatttcaccgcgcagcgagaaacactccagacccagttgtcgcaggcgcgctcgcagtgcgagtcgttggaacgcgaggccgacaacgtcgacgatgacggcggcaaggcgctggaacaggcgcgggccgatctcgccaagcggcaggaggcgcttgacgacgcgctcgcgcggcaacgggacgtcgacggttcgatcatcacgctgcaggccaaagccgacgcgctgcgcgacacgctggaatcgcgcaacgcctccggcgctctcgaacaggacgatcaggtggccgcaatggggcggctcgccgatttcatccacgtcgaggaaggctgggaggaggccatcgcccacgcgctggacgcgttctcgggcgccatcgtggtgccgggggagcgcaacctcctgcatgcgctgcgcaaggcgaagcaggatcgtctgggcaaggccgtgctcgtgatgtccgacgcggctgaaagcggtgccggtgccccggaacaggtggccgtcgctgaggagaacaatggttcgccatatcggacgccgtgtgcggccggcacgatggtgtcggcgaatccggatgcaccggacccgggccgagccgcgggggtcgtcggcgcggtgcggctgctgctcaacgacgtcgtcgcggtcgagacgatggatgaggccgtgcggatggtccacgacggcggatgggcgcaggccatcacccgcgatggggaggtcgtcaacccggtgggtgccgtgggcggttcatcactgtcgcaaagcgacctgtccttggcggcgaggcgggataaggcactgaagcggattacggtgttgcaagggcagctggacgacatcacgcggcaggttggcgaggcccgtcagcggcgggaccaggggcgagtgctggtcgacaaggaatcgcagcggcgcattcaggccaagctcaagtccgaacaggccgcgaaggcgttgcaatcggccgagtcgcggatgaagggcgtggaacgtcaggtcgcggcgatcgaggagaagctgcgcggcagtgtcgaggaacgccggagccatcagttgaagctcgacgatttgcggcgggcgctcgccgcgatccgggattccggcgcggaacatgccgacgtcgacgagctgggggagcgcgagcatcggctggaagccgcgttgaacgctacccgcgagcatgaggtcaccgcgaagatcgcgtggacggaggcggaacgcaaggtcgagtcgttcaagcggcaggccgggctgttgcgcgacaacgccgcggaggccacgcaacgacgcgcgcgcatcgaggccatgaacgagcgtcgcaaggcgcaggccgcgcacgcgcagcgcatcgccgacgatgccgcgcaggtcgcctccctggtggcggcgagcatcgacgatgtgatcgccaagcgcgaggcgctgcaggccgaggcatcgagccacgacgcggagctgaagacgctgcgggcgcagcgcgatggcatcgagccgaaggtcgcgggactgcagcggcgtgaacacgagctggatgtggatcgcgaacgattggccggggaattcgggcagttgacgcagaaggtgtcggatgacctgggactttccatcgacgagctcacccgcgatttcggccccgagcggccggtgcccgtgctggacgagaacgggcgtcccgtgccgcgtacggacgcttctgaacctgaatccgagtccgaaccaggctccgaatctgacggaggcgacgacccgagccggttcgaaaccgttccgtatgaccgtgcggaacagcgcaagaggctggagaaggcgaagcgcgacctcgccgcgctcggcaaggtcaatccgttggccggcgaggaatacgacgcgcttgagacccgcaaccaatacctgaacgaccagcgcaacgacgtggtcaaatctcgcgatgatctgatgaagctcatcagggatctggattccacgatggtgagcgtgttcaaatccgcgttcgatgataccgccgccgcgttcgagaagatgttcgccacgctgttccccggcggtaccggccgtttgcgtctcgacgaccccgatgacctgcttgccacgggtgtcatcgtcgaggcgagcccggccggcaaacgcgtcaagcagctgagcctgttgtccggcggggagcggtccctgaccgcgctggcgctgctgttcgcgatcttcaccgcgcggccgagcccgttctacgtgatggacgaggtggaggccgcgctcgacgacgtgaacctgacccgccttatcaacgcgttcaacgaactgcgcgaacacgcccagctcatcatcatcacccaccagcagcgcacgatgtcgatcgccgacgcgctgtacggcatcacgatgcgctccgacggcgtcaccgccgtagtcagccagaaactcagccgctgaccccacatcgaagaccaccctccggcgctgcgcgccacctcccgccagcgggaggattaccgattgccgacccgctggcgggggctgtcggtcgtaggccgactgggggtggccgtgcatccggggatgtggctgttgctccgcccgaccgaccttttcgcctgcgccgactctagcggcggatggccttggcccggctgacggtgtcctccacgaggacggcctgggcgtcgatgatcggcagctgaggcagcgggaacgcctcgttgagcacggagagctcggtgcagccgagcatcagcgtatcgcaacggcacgtgccggccggatcgagcatcgcctgcagcaccgactcgtagcgctgcagattcaggtcgccggttcccttcacatcgtcgtagatcagtgacgtgatgcgctcctgcaactcgtcgtccggctcgacgaaggtgtagccggcctcctcgacggcctgacggtacacgcccgaagcccgcgagcccatcgtgccgaggaatccgacgcggtggaaacgctccttggggtattgcccggccatgtgcgcgacggcgccgcgcggcatgtgcaggatcggcaccggcgtcagcgactggaaatgatcgtagaagtaatgcgcggtgttgcaggtgagcacgatgaagctcgcgcccatcgcggtcgccttgtcgatgtcgtcggcgattatcgggaacgggtcatcgtcggactgcccgatgatgaacgcggttcggtcgggcacggccgcgtcgttgaacacgacgtagtcgaggaactcctggtcgctgtgggcgtgcgtctcacggttgaccaaccggatatagctttccgtggccagcgtgcccatgccgcccaataccgcaaaaaatggtcgtctcataaatgtcgccgtcgattccgaaaagtcagtcgttcttgccgagatacgtgtcgtagttcttcgcggtcagccggtgcagcctccacagcagcagccggcgcctgaacgacaggtcccgcccgtagcgcagcgtccagccggatttgcccgccttgtgcagcgcgattccgcggtcaagcgcctcccccggctccgcgtacttcttgagcgtcgagaacggcacctccagcagcatgctgtcaccgcggccgatgaccgtgtcgccctccatcgggttgccgagcaccaggtcgtcgacgaaatactcggccaggttgaagccgttaagcgtcacgaagaagttcgtgcggccctggcgcaggttgatttcgaacagcttgtactctccgtcgcgcgggtcgaacttgatgtcgaagttcgcgacgccctcatatccgatgctttccaggaagctcttgatcttcaggcagaatccctcgttgtagtcggggatgatcgccgcgtagttgccgatggcctccggcgtcgggtcggcgagcagcacgtggccgagcaccatcatgcgcacatggtggtcatggtcgacgtaggcgttgagcacgcgcatgttggcgtcggagccggggatgaagtcctggatgatcagctcggagccgtagccggcgccgtagatcgcggagacgacatggtccagctcctcgggcgtgtgcaggatgaacgccttcttgcgtccggggaagtccacgtgcaggtattcgacgctgttcgccggcttgacggccacggggaagccgaacggcaggtcgtgatgcttgccggccgcggcatcggccttgtccagaacgaacgtgagcgggtgcggcaggtcatactgggcgcacagctcgtagaaggaggtcttgttgctcagacggtcgtgcaggtcggcatcgaccgacacgaacgtgaaatacggcttcagctcgtccttgtaccggctcagcagctcgctgtagtcgtcaccgcacgcgatgagcaggaacgtggtgtcgggtcgctcggacgtgagccggcgaccggcctcgaccatgtgacggcggaaggattccggctcggtgaagtccgcgaagaacgtcggctccataatcgaactgaatttggtgacggaaagctgcatacggccgtataccagcgatttcaggccatacgcgctgtggaacgcgcgggccatcgcgtaggcgcaggtttcactgccgagtagtacaggctggaaagccgtcattatcgatccttctgttggacgttcacgattgcttatgacattctacatactccgtgtggcgatgggaggccgtttcgtgcgcagagtgcgaagatgcggtcacgcgggccgttgcccctggcgcggggggacgatacattgaaataagacgtattctcccgatggaacgaggttggtcatggaagagacgacggcacggggattcgcggaacttcgtgaggcgttggcgtcccgcaccgggacgcggccggaggactggttcccggtcttcaaggcacggtacggcatgcaggtggcgttcgacgcagtgaggtcggttcgtggcgacggctcggtgctcacccagctgttcacctgctgcacggcggtcgatccgattgtcgtgagcgggctgagaccgcggtatgcggatgtgggcgccgacacgatgggcattgacgtcgccaaggtggagtccatgccgctggggagcgacgagcaggtgcatgcgatggtgatgcagcatacgtttggcgcgatcgatgaggactcgtcccggcggctggccgcgctggcggggcagatgggggcgttgctcgtcgaggattgcgcccactgcgtgacccgcatggcccgtgatgctgcgggatggccgttggccgacatttccgtgcactcgttcggcgtggagaagatgctgccgaccagattcggcggcgccatctgggtcaatccgcggctgcgtgagcgggatgcggcgctggacgccgagacccgaggccggctcgccgcgctggagcagccgtcccatcatctggatacggtcacgaaactgtatatcaacgagaaccgcgtgctgtcgcgtctgggcggattcggcgggcggatgcgtgagcgactcaccgcttcgggctggtatgagccgccgatttccgacaaggagcgtcgcggcgcactggaatatgagccgatgacggtgacgccgtggatcgcgcagcaggcggtggccggcatctccgcgctcgacgccaatgagaatgggcggcgcgcggtcgtgaccatgtatcgcgaggcttttgcgggcgtcgacgggttggacgttccggcagtggcgatggacggcgaggcgcagccgctgttgcggttcccgctgttcgcgcgggataccgaggcggcggagcgcatcatcgccgcagtgcggcaggcgggtggctacgccgaacgctggtaccgccccgaactgttccccggcgtgaccgatccggccgcctatgggctcgacacgttggaccgctccaccgtgccggtcagcgaccgtctggtctccaccgcgctatgcctgcccaccgaactgggtgaagacgcggttcgccgcgtcatcgacgccgtccgcgccgccgtctgaccaccggcacgtctgaccgccctctggcgcgcgcagcgggtggtcagacgtctcacccgttgcaccgcgccgggaatcttacttcttgagggtgttcttcagtgatttggcgagcttgagggagctgtagaaggccttcttgatcggcacgtcacgcccggcggccaccggggtgatttcctcggtgaacttgcacttgaattcgttgaggccgttgaggctcggtgccagctcggagccgatgcccatcagatcgtattcggtgatgccctgcgagccaaggatgcagcactcggtgtacagcagcttgtcggtcacgtgcaggcgcatcacgtcgttgcgcatgccggcatagtagcgtaccgcgtgcgtgccgttgacggtcacgattgaccatgccaccacgcggccctcgatgcgggccgcgaacacgcggcaatgattcgcgcccagcgcctcgatcatgtcggagtagtcggtgatcggagcgggcgtgaatccgtcgcgcttgccggtctccaccatcacgtcgtagtattccgcgaagtcggcgatcgcctgcttcgtctcgtcggcgatgtcggccgggcattcgcgcagcgacttgcgcacgtcgcggcggccgcgacgcttcatgcgactcaggatcgcatcgtcgccgccggtcacgtcgatcaccacggtctggtcgtacggcacggtcgacagcaccggcacggtgccgtcggtgaaccacgtgtcgatgcggatgaacgccacgtgcctgtccgctcggtgcacttcggcggcgatcgcgtcgatggcctcgcgttccagcgcctcgtccggcttgacgatccagaccgggccgtgcatcgaacgcaggtaatggtatccgtgcgtctccatgtcgatgaatgcgatgaacgcgacggtctcgccgtctcgctggatcaggtacacgccccaaggagtgcggccggggatgtccgcctggaagcgtgcccacacgtcggtctgttcgatcggcagcgtcacgccggcatcggccgccgcctgttccatttgctggtagtcggttttctgtaacgtaatcatgcttgtcttgcttgtctttctatcggttcgtgcgctttggcggctcaggcgaacatgcgctcgacgatgcggtcgtcgccctcgaacggtacgtgcttgttgtggtccttgatccagcgttcgtcacccttgccgatgatgaggatgatgttgaaccggtcggcgtgcgctcgggcgtcgtagatcgcgttcgtgacggcgctcgggcggtcggagatgacggtggacgcgatgccgggcacggtgatgtaccgttgcatctccatgcagatgtcgatgaacggttcggtgtccgtgtcctcggcggtgaagatgaagctgtcgatgcgatgctgcgccgcttcgacgatctccttgcgccggtcgtacgccttgttgccggccgagccggtgacaagcgtgatgcgcgggtgctgcgagccgaaccgctcgtcgacgaaatcgagcagcgcggtcacggaggcgtagttgtgcgcgtagtcgacgatcgccagcgtgttggactgcgggtcgtggaactgctccatgcggccggcgatgcgcaccggctccatcgcgtgcgtggccgcggcgtcggcggtcaggtcgattccggcggcatgcgcgatggccagcgccgctgccgcgttggcgtagttgaagtcgccgtccagcgccagacggaactcgccgagatcagcgccgtctgcggcgatacggtaggcgctgtgctcggcgttcgccgggcttgcggtgacatcggcggcatcggatccggcggggctctgcccgtccagcagctcgaacgtggtgaccggcacgccggcgtccgccgcgtcctgacgcagcaggtcggcatgatcgctggccgcgccaagcaccagcgcacggctgttgcgcacgatctggcgcttgcaatacaggtaatcctcgaacgtcggatgctcgatcgggctgatatggtcgggggagatgttcaggaacgtggccacgtcgaacgtcagcccgtacacgcgctcgaccttgtacgcctgcgaggagacctccatgacgaggtacttcatgccgttgtcagcggcctctcgcatcatgcggaaagcgtccatcgactcgggcgtggtcaggtcggactcgacgtacgtgtgcccgtccaggcagttgtccacggaggagaacagcgctgccttgccgtgcgagtgggcgttcagcacggcctgggtgaagtacgcggtcgtagtcttgcccttggtgccggtgatgccgaccacggtcagctcgtcctgcggacgtccgtagaactccgcggacagcaggctcatggccttgcgcgcgtcattgacgatcaggccgggtgcgccggtctctgccgaaaaatcggtgtcggccacgtatgcggccagcccgcgctcgtcgatgtcatgcagatactcggccttgaaccgccccttgcagcacagcagcgtgccctcgcgcacgtccctcgtgtcataggtgatcgccgaaaaagcggtgtcagccccttcgatgtcgtgcgcatcaagcgtccaacgatccgcgcggatgatctcccgaagcagaccgtgccgcttgagcagttgcgccgccgatgccaacgttaccgtcataccaaaacctttcctcatggtgccgctgccattgtacaagcccgacgaccgcgggaacgatatgcgcgacatgtgctgataagtccatcacaaaaccgtgcccacgctcacaatttcaccgcacgtcttgcatacaatagtgagcgtgaccgacgaacagcaaccgaacgagaccacggcgcaggcgcgagcgagattcgagaagctcgccatgcccgcggtcaacgcgctgtaccgccaggcgatgaagctcaccaacaaccccgatgatgcccaggaccttgtgcaggacacgttcgaacgtgggttcaaggcgttcgacagtttcgaggacggttcgaacttcgaggcgtggatgaccaccatcgagcgcaacgcatacttcaaccagtacgcgaaggcgaagcggcggccgcagcgggccaacgactccaccggcgaatacgacgactgggacatctacgcggcgtccgagcactcctcggagggactgaaatccgcggagcaggagtacctggacgccttcgcgccgcaggagatcatggcggcgctcgcaaaactcccgcccgagcgccggcaggtgttcattgacgcagccatcgacggcaagtcgtaccagcaggtcgccgacgagcagggcgtgaagatcggcacggtgatgagccgcctgaaccgtgcgcgcacccagttgaaacgcgaactgtcatcgtacgcgctggcgcacggatacggcgacgcccgcaagcaactgccaagttcaccgtccgcgaactccagatccccggtgagcgttcataatggagatgacggaatgcgatccgttgcgacgagcgaaaggagcaggcgtgagtgaccctattgagcggcacagccatatttccatcacacggcagacgcctgtgggcatcgtccatgcggatatgcatatcacatcggtggagatttcgggcatgcccggtgacatgggcgatgatctggtcggggactgtttcgacccggattcgtgttgcgacgagcatgagaaggcgatgatcgcggcgctgcgtgcgtatctgcggcccgaggtcgcgccggaatgtctgctggcgcggttgcgcgacacgcttgaccgctgctgctgcgaggatggcgggaatgctgccggtgccgtcgacgagccgggacggtccgcgcaacccgcgcagcctgtacgcggcgctgcggtcgtgtcctgagacgcgatttcggcttgggcccctgtctcgaagctcggcaagcaggataaaacgggcctgcataataaaacggaataataagataacaaacgggtctgcccggctttcgctgggacagacccgttgtcgtctgttatgacaccgccgtatatggcgatgtctcgcggcgtggaatcacgccgtcaggcaagaatcaggcgttcggccttttgccgtggttggcggccttcttgcgacgatccttgcgcttgcgtccgcgcatgcccatgatggactcctttactacgattaataagccttgggaattatcacatacggggtagacgttgtgcaagtggcgaattgtcaccggccgtaggatggccgggtgtcggtcacttgaccgtcacctcgtagcgcaccacggtcgtgacgctcttgccgggctctatcacggtcaggtggtcgccgctgcggaacgcgttggccggggcggtcatcggttcgacggcgatgccgttcggatgctggtcgaacggggcgccggtggccgtgtagcattgccacgcgttgatggtctcgtcgccgaccagcttgatctccatgccatcggggcgggtgaacacggtcgttgtcgtgccgtcgtcggcgcggtggacgtccacccaggcgtcgtcgaacgcgcgtccgtccagaaccgggtcgtcgcgcagatcgaacttggtgccgtccacaggctcggtgccgttcggcaccagaccggcgtcaacggtgacgtgcgtgtccgcgtcgatcttcaggcggcatgcggccgaatcggcgtcacgctgctcgctggtctcgccgtttttgccgttcgccacccacgggtgcaggccgagcgcccacggcgccggctcgtcgccatcattgcgggcgctgaccgtgacggtcatgcccttgtcgttcagctcgtatgtggcggtgacggtgacatcgaacggatagccgtcgaggttcgggaagcgcagcgactgggtgacgctgttctcggtgagcgattccagcttccacatgtactggtatgcgtagccgtggttcgcgttgttgcgcggctcggggtggcactcgttgaccggcgcgcagtagtgcttgcagttgaagtcgtattcgccgtccttgatgcggttcggccaaggcgcgaggatatagccgcagcaggtcggcgtcaggtcgtccggtccgtagctgcagaacacctccttgccgtcgtagtcgaaacggcgcagcttcgagccgagctcgcagacgacggcggagaaatcgccatgatggatggaatactggttgccggtacgcggtgtggtgcccattgcttgctccatgatcgacagtgatattgttaccgctcactatcatagtgtgcgctgggcttttgccgtgtgcggtcggggtgtcgcctgttgcccccgggcgttgtcatgtgccggtatcgcacgcgtagggatattccggccgcacccgtgcgcgtgcctttgctacgctgagtcgttgtgattgagtgatgccgcatggcggccactgactgcatgaggaggatgatatggcgaaacgcatcgtgctggcggacccgcgcggattctgcgccggggtggatcgggcgatcctcaccgtgcagaccatcctgaaggccgcgtcggcgcgggtggatggcctgccgccggtgtatgtgcgtcgtcagatcgtgcacaaccggcatgtcgtcgaggatctcgccgcgcagggggccgtgttcgtgcaggagctcgcggagatacctgacgaggctgctgccgccggcatcccgatcgtgttctctgcgcacggcgtgtcgccgcaggtcaaggcggaggccgcacgtcgcggcatgcacgtcgtggatgccacctgcccgctggtcagcaaggtgcatcgtgaagtattgcgtttcgtgcgcgaaggctacgagatcatctacatcggccatcgggggcatgatgaggcggtcggcgtggtgggggaggaccccgtgcacgtgcatctgatcgaacatgaggcggacgtggattcgctggatttccggccggagcagaagctggtgctgctcacgcagaccacgctcagcatcgatgagacggccggcaccatcgcggcgctcaaatgccggttcccgtggatgaaggagccgccgagctccgatatctgctacgccacgtccaaccgccagaccgcggtgaagctcgttgccgagcagtccgatagcgtggtgatcgtggggtcggcgaactcctccaactcggtgcggctcatggaggtcgcgcaggaggcgttggaggagcgcgggcgagcgcaccgcgtggatgacgcgaacgagctcgacccgtcatggttcgacggggtcgaggcggtcggcatctcgtcgggcgcatccgtgccggacgaactggtcgcgggcgtcatcgaggccttgcgcgcacagggcttcaccgatgtatccaccgtggagaccatcaaggagaacatgcatttcgtgcttccggcggaacttcgccggaagccctcgcaggcgcggtagtgcgcctgctcgcctcaccgccgctggcgggacgaggcgtatagcaaaccctatgtgagggtgttcaacgccaatgacggggccgccacggttcccggcatcgcggcgggggagtgctccacactcgcggtcgacggcaaggtgacgctgacgggaggctccacggtgaacgtgggcgctgacgggtatgcggcggcgggactgtccgccaccggtgcgcccgtgggcgccgtcgcgcttgctgaccgcagccggggccctgctgcgacaccgtgaaaccagtggcccaagcggcggagaatccgccgaatagtcgaggccttcccgattcgcgctctcaaaactcgcagatacgaaaagccgtttgttggaaaatggcggtttccgatttcgtatcttcgagttttgagagcggtagtatggaaaacatgggcaaaaaaacgaagcatgagaagggtgccggctccacgccggcgactgtgcagctggagaaggccggagtgccgttcaagacctacgagtacgagcattccaacgaccacatggatgacggttacggggtggaagccgcgaagaagctcggattcgatgagcatcaggtgttcaagacgctgatggccgacaccggttccgagcgcgtggtgggcgtggtgccggtcagcggacacatggatctgaaggcgttggcggcggcggtcggtgcgaagaaggcattgatggccgacccgaaggtcgcgatgcgcgagtccggctatgtggtcggaggcatctcgccgctcgggcagcgtacgcatcacaggaccgtgcttgacgagagcgctctgcaattcgacgagatcctgctgtccggcggcaagcgcgggttttcggtcggcgtcaatccgcatgatctgctcaaggtgttgaacgcggtcgctgcgcccatcggtacgtggtgacggggtccggctcagcccgccggcaagtgccgagccggtaaaaacaaagggtttatggtttgggctcccacagcgaagcactgtgggagcccaaaccataaaccctttgtggaatctagcggcctagaccgcggggattcactcggagatctcggcgaagtacagcagggtacggatcatgttgcaggtgaagccgtactcgttgtcgtagaaggacacggtgcgggccatcgtggtgccgtcaacggtgttcacgtcggtctgcgtcgggtcgaacacgccaccgtgggtgtcgccgatgatgtcggaggagacgatgccgtcctcgttgtagccgtagtactcggtgttggagaaggcttccttgaacgcggcgttgatctcgtcagcggtgacttccttgttcaggacggtggtcagctcggtgatggagccgtccgggacctggatgcgctgggcgtggccctgcagcttgccgttgacctcgggcacgaccttgccgatggccttggcggcaccggtggagtgagggatggtgttgatcgcggcggcgcggttgttgcgagccttcgggaagcgcgggccgtcgaggatcatctgggtgccggtgtaggcgtggatggtggtcatgaagccgagcttgatgccgaacttgtcgttcagcagcttgaccatggcggccatcgagttggtggtgcaggaaccggcggacacgatgttgtcggaagccttcaggatctcgtggttcacgccgaacacgacggtcggggtggtctcgtccttggccggggcggagatcaggaccttcttggcaccggcgttcaggtgggcctgggacttctcggcggaggtgtagaagccggtgcactcaagcacgaactcgacaccgtcgttcttgacccacgggatgttgttggcatccttctcggcgtagaccttgtattccttgccgtcgaccacgatggcgtcgtcggtggaggtcacgtcgaccggggtgccgtcgtcgtgacggaaggtgccgtgggtgctgtcgtacttcagcaggtaggcgagcatggacggcgtggtcagatcgttgattgcagcgacctcgatgtcaccggcctggccaccgcgagcctgcagctcgaagatgcggcggaaggcgagacgaccgatacgaccaaagccgttgataccaatcttaactgtcatgtgttctccctttgtagggtaggccgtttgcgcatggatgcgctatggcctttgtttaccaacagtgtctactgtaatgcgccgtctgtactagagcaacggtgtcgcgcttgctttgagcataaaacggccatattccgttaacgctaacaaatttgtctgtgcagcctgcggcgattcgatgcgaggcattccgcaccgcggcctcaccgcaccgccagcgccgaggacaccgccgtgtcgagcgcgcccagatccccgccgaacggatgccgcagtctcaccgcaggcagcggcgcctcgatcgggaacgtgacgatcagcgtgcccgactccaccgagaccgtcgccgcggaaccgtccacgaactcgttgctcaccccctgcacgacggtgttggcgagcgcggcgccctccagcacgtatttcagcccggcgatggtgacgccatggcagacgtcgctgtgcgagaacaccgagatcatgcggcgcggggcgacatgattggccgggaactccagcgccccgtccgcgatcgcggtaacgatgctgccgtcgccgtacagatatccgatgccgccatgcgaggccagtagcgccatcagctgcatgttggcgatcgtgtggtcgatgcgaccgcccagcgctccatatatatggaactcgcgtgcgccgcggctccatccgaccttcagcgcgctcagcagatccggatcgtccttctgcggcggcaggcggacgctgcggtcgccgtccggcacgtcgccggacagcgaatcgaaatcgccgatgacgaaatccggcgacagccccatcgcccgcatatggtcgagcccgccgtccgcggcgatcgccagcatccccttctcgatagcgggcgcgggcccctcgtaatactcgccagcgccgaaaatcacgcaacgttcatatgccatgctgccactgtatcgtgtgcacggcactgcgcgtcccgcgcgctgcgggcggcttcgctggcaggctcgaacgcagggcacgcacgaccggaggaaaacgaggacgacatggcaaagaccgacgacgcgaaactacggccgatcctctcatcgaagctgttcctgtacgtcaccgagttcttctccggcatgggcgtgatggccgcggagctcggcgcgtcgcgcctgctgatcgtcaccgtgtcgacgaacttcccggtcatcgccgcgttagctgcatgccgaccttcgtgacgatccccgcggtgggcacgttcgtgacgttcccgatcttttctggactgcttctggcactcgcgctcgtgtatttcctcgccgaccgcgcccggaccgaaacttgtggcgacacgcctggtctgggggtgtggtagtatctacaaggcttgagaaatcaagaaagcggggcaaccccacctggaagcctgtcatggcctcgggtccaaggcaacagcctatccggtcgcgtggaatgcgcggtcgtgagcatgcctcatgaggcatgtgatcatgcgaatatgtatgatggccggcgctgcagtgcgcacggttcggtgagccatggattcgtccgtcatgcccggtatccggcgaaggtccgcttcggagaacatgaggattggagtcatcattagcgacgaaccacgtatcaatgacgagattcgcgtctcgcaggtacgcctgatcggcccgaacggcgagcaggtgggagtcatcgcgacctcggtcgcgctcaacctggcgaaggaagcgaacctcgatctcgtcgaggtggcgcccaacgccaagcctcccgtcgccaaactgatcgattacggcaagttcaagtacaacgagaagatcaaggcccgtgaggcccgccgtaaccagagcaccgccgaaatcaaggagatccgcttccgcctgaagatcgatgaccacgatttcgaggtcaagaagggccatgtggtcaggttcctcaacggcggcgacaaggtcaaggtgaccatcatgctgcgcggccgcgagcagtcccgccccatcggcggcgtcgaactgctgcagcgtctggccgcagacgtcgaggagtacggcaccgtcgagtcccggccgaagcaggaaggccgcaacatcatcatgacgcttgcgcccaagggcaagaaggtgcacacccagtccgagcagcgccgccgcggcgaccagtcgcgcgccgagcgccaggcccgtcaggccgcccgcctcgccgccaagcaggaggcgcagaaccaggcagcggcggcgtccgcagccgcgatcgacgaccaagacaagacttccgaaacgaagtaaccaacaaggagggcagcaatgccgaagatgaaaaccaattccgccgcgtccaagcgcgtccgtgtcaccggctcgggcaagctgatgcatgcaggcagcgccatgcgccacaatcttgagcacaagtccgctcgcaagcgtcgtgcgctgaaggccgacggcgtgctggccacggcccagtccaagaacatgaagaagctgctgggccgctgaaccgcgccagccgaatagatacgtcaaaagaaagctgaggaataactatggcacgtgtcaagcgcgcagtgaacgcccacaagaagcgtcgcgtcgttctcgaaagggcctccggctaccgtggacagcgctcccgtctgtaccgcaaggccaaggagcagctgctgcactcctttacctacaacttccgcgaccgcaaggctcgcaagggtgacttccgcaagctgtggatccagcgcatcaacgccgccgtccgcgccgaaggcatcacctacaaccgcttcatccagggtctgcacctggccggcatcgagctggaccgccgcgccctcgccgagctggccgtctccgatcccgagaccttcaaggccatcgtcgagcaggccaaggccgctctgcccgaggacgtcaacgctccggtcgaggcctgagccgcgaacctcggcggatgcgccttcgcgcgcatcggcaaccgcatgagaaccccgccctgtgcggggttcttgcatatcatgcgggaacgcgcagatatgcaagccttccgcacgcatacagggtcctcgcatatgatggggcaccatgtacaacggatccacccggcttcttgaccagttcatcgcgcatatctccgtcgaacgcggactggccagggcgaccgtgcgggcatacgaatccgatcttcgccgctatctctcgtggctcgcgcacacgcgcggcatcaccgatcccggtgccatcggcaaagccgacatcgaggagtatgtggcgcagctggattcggacggcgacagcgcgcgcagcaaggcgaggaggcttgccagcatccacgagttccaccggttcgccctcgcgcagcacgccgtgagcgacgacgtgtccgccacggtcaaggcacccaagagcgcgcagatgctgccggatgtgctgacgatcgacgaggtctcccgcctgctcgacgcgattcccgacccgcacggcaccgacgcggcgcgggggaaagctggcaccggagcgttgccggacgccgtgctgctgcgtgacagggcgctgctcgaattcatgtacgccaccggatgccgcgtctccgaagcggtcggaatgaatctggacgacatcgacatcgacgacgcgcatgtggcgcggctgacgggcaaaggatccaagcagcgactcgtcccgctcggcgaatacgcatgtcgcgcgctgcgccgatacctcgccgaggggcgcggcacgctggagggccgcgccaagggcacgccggaacgccgcgcggtattcctcaacaaacggggacgccggctgtctcgccagtcggtatgggagatcatcaaactggcgggggagcgggccggcatcgatcgtccgcttcatccgcacacgctccggcactctttcgccacgcacctgatccagggcggcgccgacgtgcgcaccgtgcaggaactgctcggccatgcctcggtcaccaccacgcagatatacacgcacgtcagcccggagaccttgattgaggcgtacctcacctcgcatccgcgcgcgcggtgaacgcggagcggttgcccgggcgcgatagcatggatgcgacacgcgaaggaggcagctcgacatgcagcaggcggcatattcccgcttcgacggcgacgacgcgggaaacaggcagggaacgctgccgatccgcggcacctactccgccgcgccacggggagacgacgggtcttcggcggaaacggtgatggtcggcacgtccggcggccccgcgaacactggtgatgataaggtgaacggtatgcctactgatctgcttggacgagaatacgagacgttccccgcgccgaaaccgctgtcgcagcacggtcccgcgcgcatcatcgccatatgcaaccagaaaggcggggtgggcaagaccaccagttccatcaacatcgccggtgcgctcagccagtacgggcgccgttgcctgatcgtcgacttcgacccgcaaggagccgcgacagtcggcctcggcatcaacgcgaacgctgtcgagaacaccgtgtatactgcgctgttcgacccgtcgatcgatccgcacgagatcgtacagcacacggatttcgagaacctggacatcatgccggcgaacatcgacctgtccgccgccgaggtgcagctggtcaccgaagtcggtcgcgagcagatcctcgccagcgtgctgcgaaagctccgcaacgaatacgacgtgatcatcgtcgactgccagccgtcgctgggcctgctcacagtgaacgccttgaccgccgcggacggcgtgatcatccctgtcgccgcggagttcttcgcgctgcgcggtgtggcgctgctcatgcaatccatcgagaaggtgcagtcgcgcatcaaccccgacctgcaggtctacggcgtgctggtcaccatgttcacgcgcaccctgcactgcgaggaggtactgcagcgcatctacgaggcgttccaggacaaggtgttccattcggtcatctcgcggtccatcaagctgccggacgccaccgtggccgccgccccgatcacgatctacgctcccggccacaagaccgcgaaggaataccgcgaggtgtcgcgcgagctgatcgcccgcggcatcgtcgcgtgatggcgcggccatggtgagcggcgcaagcgcgatgcgatgagcgagttgacggaacctgccgacggcggcgagatcggaggcgatgccgccgtctccccgggattctccgtcgaactggaggtctattcggggcctttcgacgcgctgctgtccatgatcgcgaaccggcggctggagctcaccgaggtgtcgttgtcggagatcaccgaggagttccttgcctatgtgcgcacgctggatctcgcgcgcaacatggaggaggcgagcgcgttcctcgatgtcgcctcggtgctcgtcgaggcgaagagcgcggcgctgctgccgcatgaccaggcggatggggagcgcgacgagcagagtctcgaagcgctgcgtgagcgtgacctgctgttcgccaggctgttgcagtatcgtgcgttcaaacaggcggccggcgattttcgcgcccggctcgctgccaatgccggcaggttcccgcatccggcatatgtcgatgaacgtgtcgcggcgatgctgccggagcttgcatggtcgctgggcgcagaggacttggcgcgcatcgccgcacgggtgttcgccaacgcgccggccagcgaggtgtcgctgcatcagctgcatgtgccgcttgtcgacctgcgtgcgcaggcggcggtcgtgcgcgaccggttgcaggcgttgccggccggcggttcgatgacgttcgcggaattgacgcgtgacgcacaccgccgtgtagaggtggtcgcgcgttttctggcggttctggtgttcttcaagcaaggcgtgctgcagtttcggcaggccgggccattcgagacgctgcatctgcgctgggtcgaagacgcccaggacgccggtgtggtcgacatcgcggagggggacttcgcatgaggctcgcaaaacgtgaagatacaggcggcatcgtattggaaaatagcggtttggttttttatatctcgacgttttgtgagcgagaaaggtgacgtgatggatgtgcaattcacggcggaggactttccgggtggtctgagggcctgcatggaggcgattctgatggtcgccgaccagccgcagcacgccgccgacctggcgcgggttctgggcgtgggcgagcaggaggctcgtgccgcgctggagcgtctgcgctcgcagtatgacgaggaggggcgcggcttcgagctgcggcataccgcgcgtggctggcagttcgcgagccgggcgcaatacgagcaggtggtgtcggcgttcgtgactgacgggcagaccgcgcgcctgtcgcaggcagcgttggaggcgctggccatcgtggcgtacaagcagcctgtgacgcgcgcccaggtcgcggcgatccgcggcgtgaactccgacggcgtgattcgttcgctgaccgtgcgcggactggtccgcgaggatggcgtggacgaggattcccgggccgcgctgctggtgacctccggcctgttcctggaacatctcggattggagtcgctcgaccagctgcccccgctcgccccattcctgcccgaacgcgagaccaccaacgtccccgacggcgaataagagttgccggagggctgtcggccgtaagccgactggggtggtcggtgtttcagcgtatgtaggttatgccgcctctgcggcctcgcatgacacaccacttaaagtcatgttgactataagtgatatgctctggtcttgaactggagagcacaccagtcggaaagtgggcatgcatggtcggcggaaacgtgtcggagcggcggatgcaaccgccggccgtcggggtctccgtggtgatcctggccctggggccggaggagaccgcgtcggattgccgtgacgcgatgccctcgcgtctgtggctgccgctggtgcgccgcgtgcgccagccgtttctggggcggtgggcgctgccgggcggcgatttgcgcgccgaccgttcgctggagcagtccgcctaccacgcgttggagaccaccacggacctgcatcctcgctaccttgaacagctgtatacgttcggcgatcccgcgcgatcgcacggtggcctgccgatggtctccatcgtctactgggcgctggtcggcaaggccgaagcccatgatttcaccgaggcggacaacgtccggtggttccccgaggacgagcttcccgaactggccttcgaccatcggcagatcatcgactatgcgttgtggcgcctgcgcaacaagatcgaatacccggatatcgccaccaagctggtcggtgacacgttcacgctgcgccagctgcatcacgtgtatgaggccataaccggcgaggccatcgacgtggcgaatttccggcgtcgcatgctgctgtccggcgagctggaggataccggcgagaaactgcgcgatggccgccaccgcccggcggccgtgtaccggtacaaccccgaccgttcccgcgcgtcgacggccccgcccgtcgggccgccacgcgacgcgccgaccatcgaggagctggagggccagcgcatcgaggacgcgctgtccgcattgatgccatcggcacgcgcatgacgggaggcgggcggcaagacccgcgtccgtgccgtataaccgcatattgattttggccggccacccggttgtcagatacgttggcgtgcccgcacgccttagagaaaggaacacaccatgagcgcaacattgtccgccctgtcagtggatgagatcatcgcccgcctcggtgcgcagagcacctgcgacgccggtcttacccaggatccgtggcatttcgacaccaccaagcccagctacgggccgggcgcgtccatgctcgacaagctgccgcacaacgcgcctcgccagcaggtgctgccggaggagtaccgcaacgcctccgacgaggagctgcaggagcgcattcgctcggccaagtcccgtctcggcagcaagctactgattctggggcatttctaccagcgtgacgagatcatctgccacgccgattacgtgggcgactcgttccagctggccaagaacgccacgcagtgcccggacgccgaccacatcgtgttctgcggcgtgcatttcatggccgagaccgccgacatcctctccacgccggagcagaccgtgacgctgccgaacctctccgccggctgctcgatggccgacatggccaacatcgaccaggtcgaggaggcctggagccagctcggcgagatctgcggcaccaagcccgacgcggacggcaggcagcagatcatcccggtcacctacatgaactcgtccgcggccttgaaggcgttctgcggacgcaacggcggcatcgtgtgcacctcgtccaacgcgcacgccgtgctcgaatgggcgttcgcgcgcggcaagcgcgtactgttcttccccgaccagcatctgggccgcaacaccgcccgcgcgatgggcattccgctgagcgagatgccgctgtgggacccgtacaaggcgcagggcggcgcgaccgacccgtccgactacgccaaggccaagatgatcctgtggaagggtttctgctcggtgcaccagcgcttcaccgtcgaacagatcgagaaggcgcgcgccgcgttcccgggcgtcaaggtgatcgtgcacccggagtgctcgatgcaggtcgtggacgcggccgacggcaccggctccaccgcgtacatcgtcaaggagatcgccaacgcgccggccggatcggccatcgccgtgggcaccgagatcaacctcgtgaaccgcctggccgcgcagtaccccgacaagaccgtgttctgcctggatccggtggtctgcccgtgctccacgatgtaccgcatccacccggcgtacctcgcctgggcgctggagaacatcgaacagggcaacatcgtcaaccgcatcaccgtggacgacgacaccgcacgcgaggcaaaggtggctctggagcgcatgctccaggtgcacccgtgatcgcaagctcccgtcaacgggagcgcatcaacaatattgaggaagcagcacaatgagcaacgctgaaatcgtcgtagtcggcgcgggcgtcgcgggcctttccgcggcgctggcggtggccgatgccggccaggacgtgacgctggtcaccaaggccgacctggtggaatccaacacctaccatgcgcagggcggcatcgccgcggcggtcttcgccgacgacgacccgaaactgcacgcggccgacacgatggccgcggggcatggtctgtgcgagccccgtgccgtggagatactgacccgcgagggcgccgaccgtgtgcggcagttcgccgccgcgggcgtgcatttcgatcgtgacgcgcaaggccacatgctgcgtggactcgaagccgcgcattcgcgggcccgtgtcgtgcacgccgggggagacgccaccggcaaggtggtcgaactggatgtgtccgccatggtgcgggccaatccgctcatccacatcatcgagcatgcgttccttgaggatttgattgtgcgcgacggcgccatcgccggcgtgcggctgctcgtcaggggcggcgagacattccgcagcgccgacatggccgcttcacgagtcatcctcgccaccggtggcgccggacgtctctacccgtacaccaccaatccggccgtcgccaccgcggacggtctggcggccgcatggcgtgccggcgcacaggtcgccgacgtggagttctaccagttccaccccaccgcgatggccgtgggcgagcacttcctcgtttccgaggcggtacgcggcgagggcgcggtgctgctcgacgagcacggcgaacggtacatgacccgtgtcgacgagcgcgccgaactcgcgccgcgcgacgtggtggcccgcgagaacttccgcgtcatgcaggcgcagggcggcaagcccgtgatgctcgacgtctcgccgatgcgccgcgagaacccggatctggccgagttcctgcgtcaccggttcccgaccatcgacgcctatacgcgttctctcggcttcgactggggcaaggagccgattccggtcgcgcccgccgcgcactactacatgggcggcatccgcaccgatctggaaggacgcgcgagcatccccggcctgtatgcggccggcgaatgcgcccgcaccggcgtgatgggatccaaccggctcgcgtcgaactcgctgcttgaaggactggtgtacggtcgtcgcgccgggctcgccgccgtgaacgatccggccggttccgtgtggaacccggtctggttctccaactcggccaccggccgcatcgtcagcgacacgccggtcgagctgagcatgccggcacccgatgagcgtgccggggccaatggccggcctgccatctgggatcgcacccgcatccagaacacgatgtgggccggcgtgggcgtgttgcgcgacggcgacggcctgcgccaggccatcgaccagctcggcgccggcctggcgctggccgatgccgacgcgacggaacccgctgccacggcctgtgagcctgacccgatcacccgcctggaaaaccgcaacctgctcaccgtcggctacgtcgaggccaacgccgcgctgcgccgcaccgagtcgcgcggcgcccacgcccgcaccgactatcccgagccatgcgacgagtgggcccaatccatcgcctacatcaacgcctagcgctgtttgctcacttgtcggttggcgccggactgtcgttgcacgccgccggagtggtctcggtaccctgacccgatgcattgcgattaatcccgcaagaacgacagcagtccatatcaagaaagacccgatcatgcttacgcaacacatcatccgcaccgccgtcgaggcggcgctcgccgaagacgcgccctacggcgacatcacctgcgagaccacaatccccgcggacgaaaccggctcggcgcacctcaccgcacgcgagaggggcgtgatgagcggcatcgccgtgttcacggccgccttcacggcgcaaaatcccggtatcggcgtctcgcccctgatcgcggacggggagcgattccagcgcggccagatcctcgccaccgtggaaggtccggtacgtgacctgctcgccgccgaacgcatcgccctcaacttcacccagcgcatgagcggcatcgccaccatgaccgcctccttcgtagacgcggtcaacgccatctacgatgacggccatgacgggaccgtcacccggccgcatcgctacgagcgcactcgcatcgtcgacacgcgcaaaaccacccccggactgcgcccgttcgagaaatacgccgtggtctgcggcggaggccacaaccaccgttacgggctgtccgacgcggtgatgatgaaggacaatcatctggcggcgctcgccgcacgcggcatcgacctgaccggcgcgatccgccacgtgcgcgaacaggtgggccacaccacgcatatcgaagtggaagtcgaccggcttgagcagattcccgccgtgctcgccggcggtgcggacaccatcatgctcgacaacttctcgctcgatgacacccgccgcggcgtggatatcatcaacggcaaggccatcgtggaagccagcggcaacatgagcatggagcgcgtgccggccgtggccgccaccggtgtggacgtgatctcagtgggcgcgctgacgcacagcgtacgcagcatcgacctcggattggactggaactagccatggctgacactcccaatgcatccggcgaacccgacgaactgtatctggacgccgctgccaccgagccggtgaccaggaacgtcatcgaagcgatgatgccgttcatgaccgacgcatacgcgaacccggcaagcgtgcatcaacccggcaagacggcggcgagggcgcttgatgccgcccgcgcctcgttcgccgccggtctcggcgcccgcccggacgacgtgatcttcacttctggcggcaccgagtcggacaatctggccatcaagggcatcgccatggcacgtatgcgcgcactcggcctgcagccggtctacggtcttgccggaatcgatgacgagccgtccggcgtgaaccccgcgcaggccggtgaacatccggcgatccgccgtccgcgcatcatcatctcatccatcgagcacccggccgtcgcgcaatcggcgcaatggctgcacgaatggttcggcttcgaagtcgtgcacattcccgtggacggtcaggctcacctcgaccttgacgcgctcgaacaggagctcgacggcgaggccggtgaacgcaccacgctggtttccgccatactggccaacaacgaggtcggcaccgtcgaacccgtggaggagctggtccgcatcgcccacgcgcacggggttcccattcatgtggacgccgtgcaggcggccgggcagattcccctccgcatgcgcgattgggatgtggacgcgctgagcgtgtccggacacaagttcggtacgcccaagggactgggggcgctgctggtccgcggtcgaaccccgatcgagccggtgctttccggcggcggtcaggagcgcgggctgcgctccggcacgcagaacgtggccggtgcggtggcgctcgccatagggctcaacgagtcgaacgcgcgcatggcggcgcagtaccgggaactgacggattcccgcgacatgctgattgacgccgtgcggcgggtggtgcctcgcgccgaactcaccggcgacccggtcagtcgtctgccgggacatgcgtcattcattttccccggagtcaccggcgaagctctgcttgtcgatctggacgcccgaggcatagccgcctcgtccggatccgcctgcgccattggccgtcacgagattcccggcacgctgcttgccatggggctggaaccgcagatcgccaaatccgccctgcgtatgacattccgccgtcccctcacacgggaggaaatcgagcgcatctccatggccttggaagactcctacaccgagttgacgcattagtgcacatggtctccagtcaacgatccctgcgggggcaacgtgtgctgttactcgtcggaggacggttcggttgtgtgtcaaggcgtatcgctaagcttgtgccggtttgcgtgtaagtacagatatgaaccaaaacaagtaccgaacggttacgcgaagaatcaattaagagaggtttctatggcggttcgcggtgatattcgtaatgtggctatcgtggcacacgtcgatcacggcaagaccacgctggtaaacgcgatgctccagcagtcccacgtgttcaacgagcgcgaggaggtgccggatcgtgtgatggactccaacgatctggagcgcgagaagggcatcaccatcctggccaagaacacggccgtggaatacaccggtccgctggcggccaagtacggttacccggacggcatcacgctcaacatcatcgacacccccggccacgccgatttcggtggcgaggtcgagcgcggcatctcgatggtcgacggcgtcgtgctgctcgtcgatgcttccgaaggcccgctgccgcagacccgtttcgtgctgcgcaaggcccttgaggccaagctgccggtgattctgtgcgtcaacaaggtggatcgtccggacgcccgtatcgaagaggtcgtctccgaatccaccgacctgctgctgggcctcgcccaggacgtcatcgaggaaggcgtcgacctcgaccttgaccatctgcttgacctgccggtcgtctactgcgcggcgaaggccggctacgcgtccgtcaaccagcccgagaacggcggcctgccggacaacgacaaccttgagcctctgttcgaggacatcatcaagtacatccccgcccccgaatacgaggagggcgcgccgctgcaggcgcacgtcgccaacatcgactcctccgacttcctcggacgactcggcctggtccgtatctacaacggcacgctggagaagggcaagacctacggcctgtcccgcgtggacggttccatcgagaacttccgcgtcgtcgaactgctgcgcacgcagggcctggagcgcactcccgtcgaatccgccggccccggtgacatcgtcgccgtcgcgggcgtcaacgacatcatgatcggcgagaccatcgtcgacccgaacgacccgaagccgctgccgctcatccacgtcgacgacccggccatctcgatgaccttcggcaccaacgactccccgctggccggccgcgaaggcaaggaccacaagcttaccgcccgcatgctcaaggatcgtctcgaccgcgagctcatcggtaacgtgtcgatcaaggtgctgcccaccgaccgccccgacgcctgggaagtccagggccgtggcgagctcgcgctggccatcctcgccgagcagatgcgccgcgaaggcttcgagctgaccgtcggccgcccgcaggtggtcaccaagaccatcgacggcaagatcaacgagccgatggagaacaccaccatcgacgttcccgaggaatacatgggtaccgtcacgcagctcatggccgaccgcaagggccgcatggactcgatgagcaaccacggttccggctgggtgcgtctgcagttcaccgtgccgtcccgtggcctgatcggcttccgcaccgcgctgctgtccgccacgcgcggcaccggcatcgcctcctcgctgtccgccggctacgcgccgtgggccggcgccatcgtcacccgccagaacggctcgatggtttccgaccgcgccggcgttgccaccccgtacgccatgcagcggctgcaggcccgcggcaacttcttcgtcgaaccgcagtccaacgtgtatgagggccaggtcgtcggcatcaacaacaagccggacgagttggacgtgaacatcacgctggccaagcacatgaccaacatgcgttcctccaccgccgacgtgctggaaacgctgactccgccgatcaagatgagccttgaggagtcgctcgacttcgcgaatgaggacgagtgcgtcgaggtcacccctgaggcgattcgcgtgcgcaagatcatcctcagccgtgaggactggtacaagtggcgtgccaagcagcgtcgtcagaacaacaacgcctgacggcgttgccgttctgacgaccgtcgcgggcgctgattgcgcgcccgctcccttcacctacggacagtccgctggactgtccgtttggcggttcagcagtccaacaacgcctgacggcgttgccgttctgacgaccgtcgcgggcgctgattgcgcgcccgctcccttcacctacggacagtccgctggactgtccgtttggcggttcagcagtccaacaacgcctgacggcgttgtcgttctgacgatcgtcgcgggcgctgattgcgcgcccgtctgcttgcttctgattacggagagtccattgggctctccgtttttgtttttcgaggggctgttctgacgggtctgtgtgccacaccaggccgatttcggcgttttttgggctggtgtggtacgacggaaattcctgcgatcgggacgaatatttgttcatcgttggaaaatggcggtttctatgattttgcctgttgccataccagcgaatgttagggctaacattccattgtgtggcaatatgttggccacacaatgcggtttttgcctgttttgacgctggtgtggcatgttctgcggcagcggcatggtgttatgtcccgccagcgggggcaagatatgagttcgccgggccttctggcctgtaattggatggcctgcggacacggcttccgctgtttgccatacggctcattgcgccagcggagcgagatttcaccgcgccgatacagcgcatctccttatactggtgaccatgactcaatcggatgatcgttcaattctgccttggtctcatcggctcagccccgtgctgcgcggactcgtcaccgtcgttgccggcatcctgtgcggcatcgtcagcacattcgcgcatcgcatgggcgcttcggccaacattccgtatggactggtgctcgccttcctgattcttggcatatcggcgtggtgtgcacgctcgcggcttgacgtcgtcggtctcgccctgcacctgatcgcctcgtccggcacggtatggctgatcgctgtgcaatccaccgacgacgcgttgacgccggtcggattcagcggatcatcggtgccgtatttttcccagcgtgtgggatacctgtggctgatcggctgcatcgtcgtccagctgatgctgatgttcctgcccgcgcgatggttcgccatcacgcccaagaccgatggaaagaccgacgacaagaccgacgacaagaattcgcagcagccatcgcagctgtccgtgtcccggcagactcccgacacgctggcggagagccgatgatggccgagtatacgttgcatttcctggggccgaccgggacgttcacccatcaggcggcgatcgaggccgccaagacgatccgcccatccggcgcatccgtgacgctgacacccgagccggacgtcccgacgattcttgacgcggtgcagcgtcggggtgactggggcatcatcgcgtgggaaaacaacgtggaagggtacgtcgtgccgaacctcgacgcgctcatcgacgctgacaacgtggtcggattcgcccgagtcggcgtgaacgtgtcattcgatgccttcaccttgcccggcacatcactcgccgattgccgtaccgtcaccgcccatccgcacgggctggcgcaatgccgccgtttcacggccgaccatcagctgcagcagctgccggcatcgtcgaatggtgccgcctgccgagaccttgagcccggccaggtggcgctcggaccgagcatctgcggcgatttgtacaatctgacgcgcgtcgcctgcgccgtgggcgactatgccggcgcgcgcaccgagttcctggcactcgccccgcgggacgaggccatcaccgtgctgcgcgagcgggcatcacggacggccggggatgagaccgtggaatcgatgccggctccgggggcgacgaccgaccccgtttcggaatacgaatcgatcatcgcgttcataccgctgagcacaggccccggcgtactcgcgaatctgctggacgtgctgcgcgacgccggtctgaacatgacgagtttcatatctcgcccgattaagggacgcgacggcacgtacagtttcatcgcgaccatcgatgcagcgccctggcaggaacacctgcgcgacgtgctgacacaggtcgtcgaccatggcgattgggtgaagacgctggcggtgtatccgcgccgcgaacggccgaacccgccgatctacgcgtggtcgctgcccaacgggggagtgcgccgcgcgccggccgcgcccggcacatggacggaaggcgacactgcgcgaagggaattgctgtggtaggaagtcatgatactgcggccgccgcacggctcacggtcggagtcatcggactcggcctgatcggcgggtcgctggcccgaaggctcgccatccgcggggtgtcggtcgtcgcgtggaaccatcgcccgcatccatacgcccaggccgaagccgatggcatacgctgcatgcgcacgctcgccgaactggtcgaagcgcagccggaggtcatcgtgctgtgcaacccgctgaaggcgatgccggcgatcctcggcgagttgcggccgctgctcgaaccgtatcaggacatcacgctcaccgatgtgggcagtgtcaagatgatggtccgcgatcaggtgcgggacgcgggtctggcgggccgctatgtcggcgcgcacccgatggccggcaacgagctctcgggatgggccgccgccgccccgtcgctctacgacaacgcgctgtgggccatgaccgtggatggcgacaccgattaccgtcgttttctcgccgtcgcgcggatgatcaccgacgatgtgggcaaccgcgtcatcgtgctcgacgacgatacccatgaccgcgctgccgcgctgatctcacacatgccgcacgtcgtcgccacggcgctcatcaaccagctgaccgacgacccggaccgcaacatcgcggctgcgctcgccgcgggaagctggagggacatgacgcgcgtcgcgctgaccgatccggaccgcacccgtgcgatggtcgaagaggacgccgacaatgtggaacgactgctgcgcatgatggcggcgcggcttaccgaggtcgcggacgaattgcatggcgcagatgcaggtgccatcgccgcgtttttcgcggatggacagccgttccgtgactacaagtccgcggtcagaagcggtgcggacggggacgggccggtcttcgacctgacgatacccgcggagggatggcaggcggcactgctcgattccgcccgccgcggcgagcatatcctgcgtttcggcgacgactataccgcctgcgtgcagcgtcgcagcgcgatgtgatgctgcgggctacttgacgatagaccacccctagtcggccacgggctgactaggggcttgacggcaccacagctcaggggcgggtgaagtggcgttcggggacgggtttgagagtgatgatggtgtcggcgtcgatggtcacgcgatgttcggggcgtgacccgttggccgccgcgtcgcggatcatatccaacgtgtgaccgtcccatgaggtgacgtgtccgacgtaatcgcggtatttcatgcgatggtcggtcggatcgaccccttcggacactcggacgaccactcgcgcgttggcagggatttcattgggaattgccatggggactcctttgccgtcggtttgttccattctagtgggtgaaacgcggttttgcgggatagaatcggcaaagaaaggagtgtgcatggatggcgatggtgatctgtccgcgttccttgcgtatctgcgggccaacaggggattgtcggacaatacggtgaaggcgtacggcaccgatgtcagggagtgcctgcatgcactggcgtcgcgcggcatcgcagatctgcgtcaggtcacgaccgacgacctgcgtggatggatggcgttcgagacccgcgaccacgcccgctccagcatggcccgcaaggtcgtgtcggtccgttcgtttttcgcttgggcgcatgagcatggcaggatcgaggccgacccggcggccgtgctgatgacgccgaaactgccggacacgttgccttcggtgctgactgaggcccaggcggagcgcctgatggaccgtgtggatgacgatgcgtcgctgcatgccgcctcatcgcagcgttacgagacacggcatgatgagatgccccgccttgattcggctcatcggggcgaagagatgagtcagcgtgacgaaatcgtggcgctacgtgatgcggccatgctggaattgctgtacgcgaccggtatccgcgtggcggaactcgtcgggctcgacatcggcgatgtcgactggtcccaccgcacgatacgggttacgggaaagggcagcaagcagcgcgtggtgcccttcggcgaccctgccgagaaggcgctggccggctggaaggagcatggccgaccattgatattgcgcagagccggtgcgggcactctcgatacggtcgcgttgttcctcggcatgcgcggccgccgcatcgaccagcgtatcgtgcgcgatgtcgtgcatcgcgccgcccgcgagagcggggtgcccgatatcagcccgcattcgctgcggcacagcgcggcgacgcacatgctggacgggggagcggacctgcgcgaggttcaggagatgctcggccattcgtcgttgcgcaccacgcagcggtacacgcatgtgtcgatcgagcagctgaaggagcggtaccgccaggcgtttccccgggcctgacatcgtcacgttccgagcttgatcgtcccgcgattgcctacgtcgacaactccgcgataactccgcggccatcctgcgcttaccctgcgcttaccctgcggtcatcttgcgatcaacccgtgatttcgcctcgattgccctgcaatccgcatgattccggggtgcaacaggcgaattgtgcacgttcacatcatttaaaatcttgaaatgtgatacaaatatgaacaaaatgtggtaattaacgtcgaaatcttgacggaagcgtatccttatcatgttttgcgtttacatggggtggctataatcggtcaccaacaagaacgccgccatccaaaggcgacagtcgagtgaacgcttttgtcgttcggaacaaggaggaaggatggccccggctcaatgctgaagttcatcgccaagcgcctcgccaactacgtcgtcatgctgttcgtggcgatttcatgtacgtattttctggcttctggtttcatgcgtccgcgctcgaattacgagtcgaggactccccgccctccggcagcgtccatcaaccgcagcttggatctggccaatatcaatgatcacaccaatatcttcactcggtattggcgttggctgaccggtgtcgtcaccagatgggactggggactgtcccctgatctggggtcggtcaacggtgcgcttgcgccgcgtatcgttgcctccaccgagctggtgacgatcgccacggtcctttccatcgtgcttggcgtggcgctcggcatctacaccgcgcagcgccagtacaagtggcaggaccgcctgttcggcaccactgccacgttcttccttgtcatcccgaccgccgtgttcgccctgcttgtcgtgatgctcgccatcttcatcaacggcgccagcggcttccgcctgttctatgtgacgggtctgtccagttatacaggaaataactggttcctgagattggctgatttcgggcagcacatcatcctgccgaccatcgtgctgacgattctgggcatggtctcctaccatctgacgcagcgcacctacctgcttgacgagatgcacgccgattacgtgcgcaccgcccgtgcgaagggtctgacccgccgccaggccatccgtcgccacgcgttgcgcgcatccctgattccgaccgccgtcaacgtcgcattctccatcgcctcggtgttcaccggcgcggtcatcaccgaatctatcttcgccatcaacggcttgggccggtacttcatccaggccattctcgacaacgacatcaatgcctcggtcgccatcgcggcgttcggcggtgtgtgcaccctcgccggtgcgctgctggccgacatcgtgtccgcatggcttgatccgcgcatcaagatgagctgagtgcaggggatgtgagaaacaatgactgatacaaccgtcaaaaacaacgaaacgacacagaaagagtccgacgagagcacgtcgaagggcgatatcaagcacatcggttacgccggcctgatcgcgcgtcgtttcttccgtcagcgctccgccgtggtcggactgatcatccttctggtgctggtgttcttcgcgctgttcggcgccaacatcggcaagtgggcgtatgacgaccctgacttcctcgccctgtcggcaggtccgagcgccagccactggctgggaaccgactccggcggctccgacctgtacgccatggtggtgcgtggtctcggcaagtcgctgatgatcggcatcatcacctcggtggcgacgatggcgatcgcctcgctgctgggaacggccatctccttcttcggcggctgggtcgagcgcgtcggcatgtggctgctcgatatgctgctcgtcgtgccgtcgttcctgctgatcgcaatgatcgtgcgcaccgcgaacgccaccaccggatggatctggctgatcatcggcctgaccgcgttcggctgggtcggctatgcgcgaatcatacgaacgctgacgttgtcgctgcgcgagcgcgactacgtcaaggcggcccggttcatgggcgtcggatcgttcaagatcatcgtgcgtcacctcatgccgaacctcgcctcgatgatcatcatcaacacggtgctgggcgtcgtgggcgctgtcaactccgagaccgcactgtcgtaccttggtctgggcgtcaaggcgcccgacgtgtcgctgggttccgtcctgcagtccggcgccgtgtccatgcagaccgctccctggctgctggtcttcccctccatcgccctggtcctgttgacgttcagcatgcagctgatcggtgacggtctgcgcgatgcgcttgatcccaattcacgtgcgagcggaacggtgggtgcctgatgttcagaaagacaatgatgaaaaacaacaagtcaaagggcagcgtctcaagcgagcacaaggagatcgtgcgcgacgacatcctccagtacgagctgcttgaaggcaacggccccaagggcgcgccgaagggcgatccgatcatgcaggtgcgcgacctgcacgtgtccttcgccacagaggccggcgtgtgccgtgcggtgcgaggcgtcaacttcgacctgtggcgcgggcgtacgctcggcatcgtgggcgagtccggctccggcaagtccgtgaccgcgttgagcctgatcggcctgctcgacgacaacgccaaggtcaccggctccatcatcatgaacggcgaggagctcatcggcaagaccgacgaggagatgagcgagatccgcggcgagcgtatcgccatggtgttccaggatccgctgtccgccctgaccccgatgttcaccatcggcgaccagatcgccgaaggcctcatcacccatcatcccgacatgtccaagcagcagattcacgaccgttgcgtcgagctgctcgaactggtcggcatcccgcagcccgaggagcgtctcagcagcttcccgcaccagttctccggtggtatgcgtcagcgcgtgatgatcgccatcgccatcgcgaacaaccccgacgtcatcatcgccgacgagccgaccacggccctcgacgtgacgattcaggcgcagatcctcgacgtgctcgccaaggcgcagaaggagaccggcgccgccgtcgtgctcatcacccacgatctgggcgtggtggccggcgcggccgacgacatcctcgtcatgtatgccggtcgtcccgtcgagcgcgccagcatcgacgacatcttccagcacccctccatgccgtacacgatgggtctgctcggcgccgtgccgaagccgcacatcgccgcctcccagcgtctcgtgccgattcagggcaacccgccgtcgctggtcgacatcccgaagggatgcccgttctcgccacgatgcccgctcgccaccccggagtgctcgctgtctgagccgaacctggaagtcgtggacgcgaactccggtcatctcgcctcctgccgtcgactgcaggagatcatcgacaagaacatgaagtacacggacgtgttccccgtgcccgacctgcttcccgccgactgggccgacgtcccgcgcgaccagcgcccggtgacgctggaggtcgaccacctggtcaagcacttcccgctgaccggtggtggcatgttccgccgtaccatcggccaggtcgcggccgtcgacgacgtgacgttcaagattcgtcagggggagaccctggcgctggtcggcgagtccggctccggcaagtccaccacgctgatggagatcatgaacctcatgaagcccgaggacggacgcatcgtcgtactcggccatgacctcgccgaactcaagaagaaggcggagcgcaaggcgctgcgcaaggacctgcagatcatcttccaggatccgatgagctcgctcgacccgcgcatgcccatctatgacgtgctcgcggagccgctcaaggtgcacaagtggagcaaggagaagatcaaccgccgcatcggcgagctgatggagctggtcggcctgaaccccgactacgtggatcgcttcccggcgcagttctccggtgggcagcgtcagcgcatctccatcgcccgcgccctcgccaccgatccgaaggtgctgctgctcgatgagccgatcgcgtccctcgacgtgtcgattcaggcgggcatcatcaacctgcttgaggacctgcaggccaagctgaagatctcatacctgttcgttgcgcacgatctggcggtcatccgccacatctccgaccgcgtggccgtcatgtacctcggccaggtggtcgagctcggcgagaccgaggacgtgttcacccatccgcgtcacccgtacacgcaggcgctgctgtcggccatccccgtgcccgaccccgtggtcgagcgcacccgccagcgcatcatcctcaagggagacctgccgtctccgtccgagaagcacccgggatgccgttttgcgtctcgctgccccgtcaagctgcggctcactcccgagcagcagaagatgtgcgagacgaaacgcccggttttgacgtcggatgaccagatagcgaccgaattcgcctgtcacttcccgctggatgtgaacgacgaatccgcgccgttctaaagtctttcgggccggtcatatgaccggcccgattgcattggtttcaccgaaaagtgaaaagtgacgccaatgttaacaaaacgtggtgtatcatcacggttctagttgcgagatattttgaaggagagaacggcacgcgcaactcgtgctgttcaggagaggaatgcaaagtatgagttttgcatctaccgcgcgtaaggtcaccgccttcgccgccgctgcagccacgctcctggcgcttggtgcttgcggcaacagcaacaacggcagcgccagcaacaacggcgccaagtccacttccgaaccgcaggaaggtgttcccaccaactacaccggttcgttcccgatgccggatccgggcaaggcctacaacaacccgaaggaccgcggcgagctgaagcagggtggcaccctcaccctgccgatcaccgagatcggcccgaactggaacgccattgacgtcaacggcaacaccgtgtacatgagcggcctgtggcgcttctacatgccgtgcatctgggagtacccggcggatggttccctggagaacatcaagccgaacaccaactacgtgaccaaggtcgagcagacctccgacagccctgaaaccgttgtcttcaccatcaacgacaaggcctcctggaacgacggcaccccgatcacctggaaggacttcgagtccacctggaaggtccagagcggcaagagcgacaagttcaccccggccctcaccactggttacgaccagatcaagagcgtcaccaagggcgacaccgacaagcaggccgtcgtgacgttcgagaaggacttctacccctaccagtccctgttcaacctgctgtacccgtctgaagccctcaccggcgacgacaccaaggacggcgacaccttctccaagggttggtcgaacgactcccactccgacaagtggggcgccggcccgttcgtcgtctccaagagctccgactccgaagtgaccttcaccccgaacccgaagtggtggggcgacaagccgctgctggacaaggtcgtgctcaagcagatggagccgtccgctgccatgaacgccttcaagaacggtgagattgacgccgtcggcgcttccgatgctgagtccatgacgagcgcgaagaccgtgaaggacgcttacctgcgtcgttcctacgactccggtgtgtacacgctgaccatcaacaccaagaacatcccgctggaggtccgcaaggccttcgtccagggcgtcgatcgcagccagctgcagaagatcgacttccagggcatcgagtggaccgagaagaccccgggctccctgattctgcctcagttccaggacggctacgaggacaacatgcccgctgagtcgaagtactccaccgccaacgccaccaagacccttgaggacgccggctacaagaagaacagcgacggctactacgagaagggcagcaaggtcgcggccattacgtacacgacgttctccgactccgcctccaccaaggccaaggcaaccgccatccagaagatggccaagaccgtcggcatcaaggtgagcattgacatcaaggcgtcgaacaccttctccgacaccgtcagctctggtaactgggacatgatcggcctcggctggtccgctagcgacccgttcggctacgcgtcctccgcttaccagctctacggctccaagtccgagtccaacttctccttcactggcaccgacgagatcgacaaggagctcgagtccatcccgggcatcaaggacagcaccaaggccattgctcagttcaacaaggctgagaaggaagcccagaagctgtacgctcagatcccgttcgagaacggccagatcactgtcgccgtcaagaagggtcttgcgaactacggtcctgcaggctactcctccggcgcgcgtgtcatggtgaccgttcaccccgagaacctcggctgggagaagtgagtcgtctgactcatcgatctcattgagatagcgatatagaaatcccccgtggctgcaaagtcacgggggatttcttgtatgtgtggacgatgttggacccccccccagccggccatgccggcagcccccgatagcggaggctgccagccgaaggctgactggaggtggtcacgctggcagagcggggttataccccgctcagcggcagaccttggagatcggctgccagggctgcagggtcaccggttcggaatccaccgcggcgagcgtgcgctcgtccaggtattccttgcggatgatgagctcctgaacatagcggtcgaaccacgcgccggaggcgacatagtagccgtccttgccgttgtccttgccccagctgttctccaccttccaacggtccggctcaccggccttgtcgaggttgacgccggtgagcgtcatggcgtggttgctgcgcgaatcgttgtattccagaccgtgcgccttgtccgatgcgaactcggtgccgaacagctcatccacgcgcacggtgccacgatcgaagatgccggccttgcgcagtgagaactgtgcgcagtcgcaggcgaaccagattgggtggcctgcggtcagctggtcaacggcggccttgcggaacacgtcgagcggcacgttgatgaagtccatcggagcggcctccgccacgttgcccacgaacgccagctgatagcggcggtaatacggggtagaggcgagcggggagttcgtcaggctcacgaaatcatccaaatcctcgcccacgtacttcgcgtagaactcctgcggcgtgatgccgtgttcgacgatctgcctgcgcgagtcgatgccggacttcgtgccggactcggacgccttggcgtcatccttggcgtcatccttggcgtcgtccttgccctcgtccttgacgcgcagcagcagatcgaagctcgccggtggctcgcccattgcgatagcgcagatacggtacacgaccgacatctgcccggtcttgagcgagcgcagctcctcaaccgacttgccggcctgatgggcgtcgcgcaattcggcggcgaactcgcgcagcttcgtgttcaggtactgctcgaatgccgaggaatcgcgggagttcgacgactccgggtaggcctccttcggcaccagaccgtacttcttgaccagcgcgacgaacatctgccaccagccgccatcgtcggccgggccttcgttgaccgcctcgaagatgcggctgtccgtggtcttgtcgagcgtcttgagcacgttctcaaggtagaagttcgacttctccagcttgtcgtagaagaacagatagctttcggagaactcgaaatcgtcgaggttccacttgtgcatcagctcgtagcgcagcgtgttcagcgatgcgaacatccagcagcggccggaatgctcctgcgaggtgatcgaaccctgcttgagttcgaccgagaacgtgcgggggagctcgcgcacgccgcgatacgaggtcgcggcctggagaatgccgttcgataccgccgcgttcgccgccacgaggttcgcgcggtccgcgttgaacgccgcggagtattccctgagctgttccgcagtcagtgccaggttgtcgggctggttggaagccatgtccatgatcctttcctattgtcggaatgaaaaactgccacgaagcagtctactccgcctacgtaggccgtgtgtgagcggggaccggaagattccggtcgaaactgcggctcgcactgtcaacgggacggatataggatggccccatgatcaccatcaccacatccaacgtgaacggcatccgcgccgccaagcgcaagggcatcgagacatgggcgggcgagcacgccccggacatctggtgcatgcaggaggtccgtgccccgcaggacgagctcaatccgatattcggcgagttcgggttcgaatacgccaccgccggcaagatcgccgaccagagcgagctgacggcgatgaacgaggtctgccgcgtcaagggacgcgccggcgtcgggctgctgaccgacctgcccgtgacagcccggcgatacggtttgtccgggctggacgaggatgtggattccggtcgatggatcgaggccgacgtgacgacgccacagggctatggaatcaccgtcgcatgcgtgtacgtgcacgcgggcaacagcgacgatccggtgaagatggcgcagaaataccgcttcctcgacaccatgctcacgcgcatgggcgagctgcgggacgaggcctcgcgcggcggcagacaggccgtgctgtgcggcgacttcaacatcgcgcacacgccgctcgacatcaagaacgccaaggccaacatcaagcatgccgggttcctgcccgccgaacgcgcctacgtcgaccgctggctgggggagtacgagttcgtggacgtcatacgctcgctcgccggcgacatccaggggccgtacacgtggtggagccagcgcggcagggcgttcgacaacaacgtcggctggcgcatcgactatcagttcgccactccggaactcgccgagacggcacgaggcttcgtcatcgacaaggcgcccagctatgacgcccgctggtccgaccatgcgccgctgaccgtcacgtatgacgtgtgatcatgcaatccatgacgcgctctgggccatgcggcggccgttcggaccggcgacaatccggcggcgtcttccaagccaatcacaagccctagtgctacgctagtcacggttgcaacctgtacaacgaaatgaggaacccatgggactgtttggattcggcaagaagaagcgtgaacgcgaggaagccgaagcgaaggccgagaatcgcgaggacgaggccgccgtcgacaccgaggagaccgccgccccgaccgacgtggcggacacgtacgaaggccgcggcgaatcctacggaccgtgggacgtcgatgacgagaacgtgccggattacgacgagtacctcgacatgggctcctactacctgccgtatctcgcgggcctgcagctgcgcatcaaggcgaaccgcagcacccaggagatcctcggcgcgaccatcagctacggcgcgtccagcctggagatcgaggcgttcgcggcgcccaagaccatgggtctgtgggacgatgtgcgcgccgatttgctcgaggccaacgagaaggcatccgaacacgcgggcgtgttcggcaccgaactccacctgccggtcaccgtcaagggcggcaagaccgtgaacacgcgcatcgtcggcgtggatggcccgcgttggatgctgcgcggcatcttctccggcaaggccgcgaacgatgacggcaactccgacaccgaagcgctcaacaagtatttcgccgacatcgtcgtggagcgcggcgacgagccgctcgccccgcgtgatctcatcccgatgcacccgccggtgacccccgcccagcgtcaggcggcggccaagaccaaggaccaggccgacgacaaggagcatctcgacgacatcccggacaagcccgaagggccgttcgactccgatcagcagaccgaggtcaagaccacgctgtcgcgtggaccgatgttctccgaagtccgctgacgaatcccggcgctcgacgccgggagccaaggaacgagcatgaccgatcagaaccagaagaaacgtacgggtatggcgtccctcgccgccgcgggcgagggggaggacttctccgtcatcgacgccatcggcgggccgcgcggcgtcatcgaatcgatgctgccgggcgtgttgttcgtcgtgttgttcgtcgtcaccagcaacctcaacctcacgatcggtgtctccgcggcgctggcggtgctgcaggtcgtcatcaggctcgtgcaacggcagtcggtcatgggcgctctcagcggcctgatcgccgtcggcatctgcctgatatgggcgtggcagagtcatgaagcgcgcaactattacatgttcggcttcctcaccaacgccgtgtacatcgtgctgctgtccttcaccctgctcatccgcgtgcccggtctggggctcatggtcgagttcatccgtaccatccccaccgagcatttccgcgcgtggctgcacggctggctggacgacaagccgctcaggcgcgcctacacgatcgtcaccgtgctgtggatcggcgtgttcgcgctgcgtctcatcgtgcaggtgccgctgtacctcgccgattccgtggcgctgctgggcacggcgcgcctgctgatgggcataccgttctgggcgctggcgatatgggtgtcgtatctgatcatcgccaccccgctgcaccggcacatcgccgcggccaaagcggcggtcggcggcggcaaagacggtgacagtgacggccgcaacagcggtgatgaaggtgacaacgcagccggacaggcctgatccggtcaaatcgcgaaaggaaacaatgaacgcgcaagtgcgtatcgaacgttatgccgaccagggacgatgcgtcgggcatatcgatggccgtgtggtattcgtgaggtttgccctgccgggcgagctggtgcaggtcgcattggatgaaccgcacgaccgcgacgaccgctactggaccggcgaggtcgtcgaggtcatcgaaccgagccccgatcgtgtggatcccgcatggccgctggccgggccgcttgccatgagtggtggcgtcggcggcgccgatctggtgcacgtgagcctggaagggcagcttcgctggaaggccgccaccatcagcgatcagatgagccgtctcgggcacgtggacgtcaccgtgccggtggaacgggccgaaggcgacactgagaacggtggcctgcactggcgcacccgcatcgagatgatcgccgatgacgacggcatgccgtcgatgcgtcggcgcggctcgcacaagcgcgtgccgctggacacgatgccgctcgcgacagacaacctgcttgccgtcgccgatcgcgaacacgtgtgggatggcgggttcgaacccggatcccaaattcgcctgtctgtgcccgaaccgaggaagcagcccatcgagggcaattacgccgtgctcgtggacggcgaactgcgcgccggaaaccggcatctgatggagaccgtcaccgtgaacggccgtgacttccaatacatggtcgacgcgaacggcttctggcaggtgcaccgtcaggcaccggtcatgcttgccggccatgtgatcgacctagcgaacaaggcgcttgacggcatgacctccgcctgcatctgggacttgtattccggtgccggactgttcacgctgccgctggccacgatgaccgccgaacgcacgcgcatgctcagcgtggagggcggcaagaccgcggtgaagaacgcgcaacgcaacctccgcgcgttgaacctgcctgatgtggacgcccgttgcggcgatgtgtccgccacgctcgcgcacgtgccggcccatctgtcacgacctgatctggtcgtgctcgatcctccccgcgccggcgcgcacgccaaggtgtgccgccagatcgcgcaggcaggcgcgaaggacgtcatctatgtcgcctgtgacccgaccagcctcgcccgcgacacggcgacgctgatctcgctcgggtaccgcctgtcggacatccgggcgtacgacatctacccgatgacccaccacgtggagacggtggcctggttcacacgcatcggacggtgaggcgatgggtcgggtacgcggcgatcatgattgcgggttcctgcggcgcatgtggcgccgtgggattggcatcgcgtgcgccgcggccgcggtgatgtcgctcacctcctgcgtgccgcagggcaaggcggtcggcgatacgcaggagagcgaaccggagatcgcccatgagggcgtccaacggcaggatatcgtcgtcggcgtcatcggctccgtggacaccggcctggactctgatgtgctgaacgccttcaacaaggccgggttgaaggcgccctacgtatccaccagcatggtcgacgatccggatgccgccgcgcagcgcggagtgcggtccatggtcacgcgcaaggccaccgtcatcatgatcgacggcattgccgtcaacgagaagaacgccgaagactgggatgccgcgttgcagtccgcgcgcaaggcgggcgttcccgtcatcctcctggatccggtcgccccgcccgacgacgatacgttgttcgccgtcacgttcacgcttaccggcaagggagacggcgtgaccgccctcgacgacgccgtcgtcaccatcgtcgacgacaaaccccacccccgcacgatgaacgtcaccgacaacctgtcctgaccttccgatatccggagctcttccgcgggagcggtagtccgtattttcgccccgctggcggggctgtcgcggagcgactggggatggctcggcgtttcatcgcctgccggctattccgtctgaccgccctccggcgctgcgcgccacctcccgccggcgggaggtgtggaggcgtaggtggctgcggtgatcagccgagagccacacctcatcctgctgcgctcgatggggaacgtgtgtgaaaataccgcctgggaatgatgcccccgttatgctgccacgggtaggctagtacgtatgaatgcaaccatgaacctgcctgaagtcgaggaaaacggcctgaccgcctcgcaagtgcgcgcctgcgaggagagcggtcagacgaacgcggtgaagagcaccacgtcgcgttcggtactcgacatcgtgcgggccaacgtcttcacgctgttcaacggcatcatcttcgccgcgatggtactggtgctgatcaccgggtcatggaaggacgcggtgttcggcttcgtcatcctcatcaacaccggtatcggcatcgtcaccgagctcaaggccaagcgtacgttggatcggctgtcgattctcgtcacatcggattatgcggtgcgccgcgacggcgagaacacggaggttccttcgcgcgacatcgtactcggcgacctgctgtggatacgttccggggagcaggtgccggctgacgcgcaggtcctgtcatcatacgggctcgaactcgacgaatcgatgctgaccggcgaatcgcgcaccgtgcgcaaggaggacggcgaccaggtgtactccgggtcgacggcggtgtccggcgtggcgctcgcgcgggtgaacgcggtgggcgagcacagttacgcggcgacgttgaccgcacaggccaaggtatacaagaagacggtgtccgacctgaacaagggcatcaacacgatcctgaagttcatgacgttcctggtggtgccgctgtgcgtgctgctggtctggtcgcagatgaggaccgtgggcggatggaacgccgcgatagcttcgggggagtggcggcaagccatcgtgtcagctgtagcgggcgttgtcggcatgattcccgaaggcctggtattgctcacctcgctcaacttcgcggtcgcggcgatgcggctcgcccgcaagaacacgctcgtgcaggaactcgaatcggtggagacgctggctcgcgtggactgcctcaatctcgacaagaccggcacgatcaccgatggcggcatcatgttcgaccgtctggtcatgctggaacgcatggacggcgacgatcgcgtggagagcgcggcgacccaggcgctgtatgacctgtcgaacgaggagcagccgaacggcacgggtcaggccgtgctcgacgggctgggggaacgcggttaccatgccggcccggtgcgagcgcgcgtgccgttctcgtcggcccgcaaatggagcgccatcgtcaccccggccgcagccgcggaaacggaatcggccgccgaccgcgagccgccgaccgtctggtatatgggcgcgccggaagtgatgctctccgcgctttccggagagcacggcgatgtgctcgaagcggtcaatgattacgctaattccggcaaccgcgtgctgctcatcgcgcgggcgacgctcacacggaagagcgacggcgatgccgcaattggcgatgccgcaacagattcgtcatggttcacgcagtcgcccgaactgctgccggacgccaagccggtcgcgctcgtattgtgttcggagtgcgtgcgcgacgacgcgcagcccacactggcatggttccgcgatcagggcgtgcgctgccgcatcatctccggcgacaacccggtcaccgtcggcgcgatcgcggccaaagtgcgacttacaggagaccgcgagccgcacgccatcgacgcgcgcacgctgccgcaggacatcaacgagctcgcccgcgtgctggagaacgtcgatgtgatcggccgcgtgctgcccgaccagaagaaggcgatcgtccaggcgctgcacaccagtgatcacgtggtcgccatgaccggagacggcgtcaacgattcgctcgccatcaaggaggccgatctcggcatcgcgatgggcaacgccgcgcccgccaccaaagccgtggcacaggtcgtgctcgtcgattcgaagttctcgcacctgcccgacgttgtggcccgcggccgtcaggtcatggcgaacatggagcgcgtcgccagcctgtttctcgtcaagaccgtctactcggcgctgatttcgctgggcgtggtactcaccgcgatcccgttcccgtacctgccccggcatatcacgtacgtcggcgcgctgaccatcggcatgccggcgttcatcctcgcgctcgcgccgaacacgcggcgttacatccccggcttcctgcggcgtgtcgtgtatttcgcgctgccgggaggcgtcgcgatcgcattgtccgtgctgctgtcgtcgtggctgttgcccgacgtgatgggctgggatgtgaacaacgccgccgatttgtccgcgttgcgcaccacctgcgcgatcatcgtgttcgtgctgggcgtgttcatgctcgcccgcgtggcgcagccgctcaattcgtggcgcggcgtgctggttgccgtattcgccgcggccggcgtcatcggcatgttcattccgttcgtggcgaggttcttcgacctgcatctgccgaccgggcgggtattgatcgccacggtggcggcgctgctgatttccacggccctgttcgcggtctgtcacgtcatcctcgcctcggtgacgcgaattttcccacatatcaagccgacacgccagagctaaagtaacgtatcggtatcgttggtagcggataatctcttgtggaatagcatttcatttgatctcggaggaagcatgtctgtgcgagacgaccagttggcgacactgaacgtggccggcaaggactatgactactaccgcatcgccgacctgcccggcgtcgaccatctgccgtactcgctcaaggtcctcgtcgagaacctggtacgcaacatcgacggcgcgaacatcacggacgaacacgtcaaggcgctgctgaactgggccccgcaggcccagcccagccatgaaatccagttcacgccctcgcgtgtgatcatgcaggacttcaccggcgtgccctgcatcgtggacctcgccaccatgcgcgacgcggtcaaggatctcggcggcgaccctgaggtcatcaacccgcaagtccagtccgacatggtcatcgaccattccgtgcagatcgacaagtacggcgtggctgacgcggtccagcagaacatggacatcgaataccagcgcaacggcgaacgctaccagttcctgcgctggggccagcaggcgttccgcaacttccgcgtggtgccgccgggaaccggcatcattcaccaggtcaacatcgaatacctggcgaaggtcgtcatgacgaaggcctccggcttggatgatggccgcgagctcgcctacctcgactcctgcgtcggcaccgactcgcacaccaccaccgagaacggcctgggcgtgctcggctggggcgtgggcggcattgaggccgaggcggccatgctcggccagccgatctccatgctcgtgccgcgcgtcgtcggcttcaagctcaccggttcgatccccgagggcgtcaccgccaccgacgtggtcctgaccatcaccgacatgctgcgcaagcacggcgtggtcggcaagttcgtcgagttctacggcgagggcatcgcctcggtgccactggccaaccgcgccaccatcggcaacatgggacctgagttcggctccacctgcggcatcttcccgattgacggcgtcacgctcgactacctgcgcctgaccggacgttccgaggagcaggtcgcgcttgtcgaggcgtacgccaaggccaacaagctgtggggcgacgcctccgacccggactatgtcgagccgcagtactccgaatacgaggagctcgacctcggcacggtcgtgccgtccatcgccggcccgaagcgcccacaggaccgcatcctgctgtccgaggcgaaggacatgttcgagaagaccgcacccgcctacgagaccgacaagaccgtcaaggacccggtggccgtgtccaccgacttccgtggcgatttcgacatcgaaaacggcgacgtggccatcgcctcgatcacctcgtgcaccaacacctccaacccgtccgtgatgatcgccgccggcctgatcgcccgcaacgcgcacgccaagggattgagccccaagccgtgggtcaagacctcgctcgcccccggctcgcaggtcgtggccgactacctcaaggccgcgggcctccaggacgatctcgacgcgctcggctaccagctggtcggcttcggctgcgccacctgcatcggcaactccggaccgctgctgcccgagatctccgaagccatcaacgccaacgacctgaccgtcaccgccgtgctgtccggaaaccgcaacttcgaaggccgcatcagcccggacgtcaagatgaactacctggcctccccgccgctggtcatcgcctacgcgctcgccggcacgatggacttcgacttcgagacccagccgctcggtaccgacgcagacggcaatgacgtgtatctgaaggacatctggccgaccaacgaggaggtcgcggccgtggttgacggtaccgtcagccgcgagatgtttctcaaggactacgcctccgtgttcgacggcgaccaccgctggaagagcctcgacgtgcccgaaggcgagctgttcgcatgggacgagcattcgacgtacgtgcgcaagcagaccttcttcgacggcatgaaggccacgccggagccagtcgccgacatccacggtgcccgcgtgctggcgttgctcggcgactcggtcaccaccgaccacatctccccggcgggcgcgttcaaggtgtccagcccggccggcaagtacctgaccgagcgcggcgtggagccgaagaacttcaactcctatggctcgcgtcgaggcaaccacgagattatggtgcgtggtacctttggcaacatccgcctgcgcaaccagctgctcgcctccgtcggcgaggaggtcacgccgggcgggttcacctacgatttcacgactggaaagccttcgacgatctttgacgcctcgctcaactacaaggccgccgatattccgctcgtcgtgctggccggcaaggagtacggcactggctcgtcgcgtgactgggccgccaagggcacggtgatgctcggcgtcaaggccgtcatcaccgagagcttcgagcgcatccaccgttccaacctcatcggcatgggcgtgctgccattgcagttcccggcgggggagtcctatgagtccctgggtcttgacggcaccgagacctacgacatcgccggcgtggacgagctcaacagcggcgtcactccgaagaccgtgcacgtcaccgccacgcacaccgacggctccaccaccgagttcgacgcggtggtccgcatcgatacgcccggagaggcggactactatcgcaacggcggcatccttcagtacgtcctgcgcaacctcatgaagtaagcggcccgaagtcccttgaccccatggtcaagggacttcttttttctttcttcctctccttctctccctcttcctttcctctttccgggagttatccacaggcgcgacacgcccggactgcattgcacaatcctcggtagcatctccatagaacggctgtattgcaatggttcggcaacgtggcatgactattgtgcggcgcagtccgggcgtgtcacaatcgagccttcgaccacattgcccgaaaacctgaagaccgggccggaaaacctgttaccgttcgtccatgtttgagatgcgaaacgaaccgccaccgaaccaatacatgcggcatcaggcgtggctcatccagcgctattacctgaagcgttgccgggcggtcagggatacgctggagcatgagccggtattcgcgttgtcgtcggcgctggggctgatgggcattgcaccgcccgagaccgccgtccttgatttgggcaaggaacatatcgtcgttcggaatcgtgacgcgcgacgcggtcatcccgccaatgtcgtatgtcacgcgtggtcattgctggacgaccgtatcgtaatccgcatctttgatctgtactgcacgtcacccgccgcgacgttcgcccaattcgtgcggttcaactggttcgaggaaacaattatattggcggatcggctgacatgccgtgacgagcggctgaggcgcgcgacccaacaggaactgatggacttccttgatgagcggaaggtctatggcggcaaggccgcacgccgggcgttgcgtttgtctcgtccgaacaccgattcccggtgggaacgggagctgcgtctggatgcgatgaaatggggattgccgaatccggaggcgaactatccggtcgatttggagtctggattggcatggcttgacatggcatacgagaggtatcgcgtggcgatggaatttcatgggcagcagcatctggaacagtatgtagcggacacgaggcgcatgaacgcattggcggccaagaattgggtggtgcttccggcctggcagagtacggtgcttgaccaggccgaactgcatcgatacttcagtcaggtggccgccgctttggagcatgccggtgccgtcgattttctgcatccgcgcatggatctgtggacgttgagcggcaatccggagctgctggaaccgttttgacgtaggagcgaccgattgatatatggtccgagacagggatggcagtcgtcgtgatacgacacgcccggagtgcgcagcacgaccgccgaatagtcgctgcgaggtaacggtataaacccgttctggactccggacacaacgattgtgctgcgcaatccgggcgtgtcgtgttatgggaacaccggtgtatcgaggaaagaggggaacttgaagagagaaagtcgggaacaacggttgagggggcatagaacagatggaagagagatggccggcaggatgtgggagaagtcctcggaacgggataaagaagaaccgtttcgcttacgccggcgaaacggttctcgagcagtgacggacgatcccgtcacgcgaggccggagagcttgttgatgagctcggggtctcgcgtggcgcccttgtcggcggagcgtgcgaaggcggcgtacgccttgagggcctggctcaccttgcggtcgcggtgcgccacgtagccatcgccggcctccagttcgcggcggcgctcggccagctgctcgtcggtcagctcgacgttcacggaacgggcctcgatgtcgatgtcgatgatgtcgccgttcttgatgagcgccaccgggcccttgttcgccgcctcgggagccatgtgcccgatggccagacccgaggagccgccggagtagcgaccgtcggtgagcatggcgacctgcttgccgatgcccttgcccttgacgaaggacgtcgggtacagcatctcctgcatgcccgggccgcccttcggaccctcgtaacgaatcaccagcgccatgccgggcttcagcgtgtcgtcgaggatcacctcgatggcctgctcctgcgaatcgaccaccagtgccggtccgcggaacttccagatctcctgcggcacgcccgcggtcttgacgacgcagccgtcgggagcgaggttgccgcgcagcacggcgagaccgccctcgtggatctccggatggtcgatgtcgtggatggcgccgttggcgcggtcgcggtccagcgagtcgaacagcgtggtgtgcgtccacggttcgggagagatgatgtggccgggagccgccttgtacatctgctgggcttcttcggtgcaggtgggacgcatgatgtcccagtccgccagcttggcttccagcgtcgggtagtcgatggagtgcacgttggtgtgcagcttgccggcgcggtcgagctcgccgaggatgccggtgatgccgccagcgcggtgaatgtcggagatctcccacttgccggacggcgacgccttgcagatacacggcacggtgtgcgagatgcgctcgatgtcgtcaagcgtgaagtccacgtcggcggactgcgccatggcgaggatgtgcagcacggtgttggtggaaccgcccatagcgacgtccatggtcatggcgttctcgaatgcctccttggtggcgatggagcgcggcagtacggagtcgtcggagtcgtcatagtactggtgcgcgatcttgacgacctgctgcgcggcgcgcttgaacaggtccttgcggtaggagtgggaggcgaggatcgtgccgttgccgggcagcgccaagccgatggcctcggtcaggcagttcatcgagttggcggtgaacatgccggcgcaggagccgcaggtcgggcagacggtcttctcgtagttgagcagctcctcgtcggagacggaatcgtcggcggtggcgtacatcacgtcgatgaggtcggtgctcttgacggtgccgtcggcgaggatcgtggtgccggcctccatcgggccgccggagacgaacacggtggggatgttgaggcgcagcgcagccatgagcatgccggggacgaccttgtcgcagttcgggatgcagatcagtgcgtcggcgcagtgcgcgttgcactggtattcgacggtgtcggcgatgatgtcgcggctgggcagggagtacagcatgccggtgtggcccattgcgatgccgtcgtcgacggccatggtgttgaactcgcgcgggatgccgccggcctccttgatggcctcggagacgatgcggccgaccttgttgaggtggacgtggccgggcaggaactcgtcgaacgagttggcgatggcgatgatgggcttcttgcccatgtcgtcacctttgacaccagctgcacggtagagggctcgggcacctgcgaagacgcgcccgttcatgatttttgcagatcgcatttcagtcatggttctattcaagctcttgcaagggacacgcgacatgtcaagagtcggaatatggaattttcataagtgttacaaaactcacagtggattaagcctatgtagccttttatgttgtctgcaagtcggcaacgaactggcagaatccaccggacccgctccggtcgctgcgtgaggctataatcgctgcggttgagatagatttccatcatgtgattcggagacttgcaaaaatggcagaagaaaccaaggataccgaggtcaagggcaacgaggagttcggcaccgcgcccgtgcccgagggtttcgcgaacccgccgatcgacgatctgatgaagcacgccgattccaagtacgcgctggccatcttcgccgccaagcgcgcccgtcagatcaactcgtacttcacccagctcaacgagggcttgctgcagaacgtcggcccgctggtcgaataccagaaccaggagaagccgctgtcgatcgctttccgcgagatcgacgagggcctgctggaggagactctgggcgaggatgatctgagcgaaggcaactgattcgtctgaatccgtccggttcgctgtacgcggtatttgctttttctggggcgacactcttgcccttgacggcggtgacgtgtacaactgagcgtcaggagcgaacggcttggggctcgcgccgaccgaaggtctggcacgggcccttttcgtagcctgttcaggtcctgcaacaacagaatgaaccaacgtatcattgtgccttatccgcaaaaggcgggtagggcgataagtccgaaagagggatgatatgaccaatcaggagcgcaagctcatctcggccgaatctgtgaccgaaggccaccccgacaaggtatgcgaccagatttccgacgaaatcctcgacgaactgcttcggcaggatccgcagtcgcacgtcgccgtcgagacctccgccgcgaccggcgtgttcctcgtgttcggtgaggtgacgtcaaaggggtatgtcgacgtccagtccaccgtgcgcgagacgctgcgccgcatcggctacacgtcttccgaggtcggcctcgacgccgactcctgcggcgtgatcgtcgccatcaccggccagagcgccgagatcaatcagggtgtggcgcgcctcaccggcgagaaggagaccgaggccagccgcgaggagcggtacgaggcccagggcgccggcgaccagggcgtgatgttcggttacgccaccgacgagaccgacgtgctgatgccgctgccgatctatctggcccaccgtctggccttccgcctgaccgaagtgcgcaagtccggcgaagtgccgcacctgcgcccggacggcaagacccaggtgaccatcgaatacgacgagaacgacaagccgttgcgcgtcgacaccgtgctgatctccacgcagcacgacccggaggcgagtcgggaatggctggccgcccagctcaaggagcatgtcatcgatccggtgctggacgaggtgctcggcgacggcgtcaagcatgacgattaccgtcagctcgtcaacccgaccggctcgttcgtcctcggcggtccggccgccgacgccggcctgaccggccgcaagatcatcgtcgacacgtacggcggcgccgcccaccatggcggcggcgcattcagcggcaaggacccgtccaaggtcgaccgttccgccgcgtacgcgacccgctgggtggcgaagaacatcgtcgccgcggggctggcgcaccgtgtcgagctgcaggtcgcctacgcgattggcgtggccgaaccggtgtcggtcaacgtcgagacgttcggcaccgaaatcggcgtgacccgcgagcagatccagcaggccgtgcgcaaggtgttcgacctgcgtcccgccgcgatcatcgacgagcttgacctcaagcgcccgatttacgcgaagaccgccgcatacggccacttcggccgcgtcgacgtcgagttcccgtgggagcgcaccgacaaggtcgaagagctcaaggccgccatccgctgactggcaaatcacaacgatcaccctcggtttcacttcgtagcgtccccgccagcggaggctgccgcgaagcgaaaccgggggtggtcttgtctatacacacaacatgcatacgcaaaaaagccgccggacaccccgagaaggttgccgcctgcggcggacttcaccggcggcgtgatacaaatgaaccatgagtacgaatgacgcgcagcagttggcgtttgacggcatggcgccgcgcaaacgccgcaagcgcgcgcccgccgagaagattgtggccgcggaagacccgatcgcgcaggtggtgctggacgtgcaggcgacccatctgggccagacattcgactatctcgtggaggagcggtggtcgcagaccgcacggcccggcgtcatggtgcgggtccggttcgggggcaggctcctcaacggcgtgatctggaagcgcacggcagccagcgccacgccccgctccgcgctgagatttcttgaacgggtgatcagcccgcacgtgctggtatccgaatccatgcgcgacgatatcacgcgcatcgccgacgcctatggcggcacgcgggccaacatacttcgcctggcggtccccccgcgcgtggcgcgcatcgacggcgaacagcaactggccgcgcgttcgctatgggtgggaaggcccagattctcgcacgtctcggacgaactgatgcaacggtgcttcgacacgatacaggcttcatatgacggcgccgccatgctgcgctcatccctggagggcagctcgttcgccgccctggtgatggatgcgcgtccgggagcgcgtgcgtgggctcgtgacgccgcgtggatgatcgctgccgcgatgaggcagaaccgtgccgccgtggtggtcctgcccgggataagacagtgcgaggatctcgccgttgccctggagggactgggactgtcccgtttcgcgccgggcggcgccgagcacggcggatactccggtgacttcgtcgtgctggccgcaggactgccgccggcggaacggtaccgtgcctatctggcggcggcgaccggtcaggtcgggtgcgtcatcggactgcgtgccgccatgtatgctccggtcgaggggccggccctgttcatgatggtggacgatgccgcgtaccagcaggctgacgggatgatgccgtacgcgcaggcacgcggcgtcatgcgtctgcgcgccgagtcgcacgggggagtgtttgtggcgctgtcgtacgcccgtagcccgttgagccaatgggaatgcgaggaccacacggccgtgactgccgtgagcggcccgagcgcatccgtcacgccgttgccagccgctcgcagggatcagatgccgtgggtgcggtggctgaaccgcgaggagctggcgcgtctcgccgacccgagcataggcgcccgcgtgccgcataccgcggtgacggtgttgtcgaaggccttgcagacagggccagtgctgctgtccatcccctcggacggcatgcaggaggcgttgggctgcgtgaaatgccatgcgcaggctcgttgcgcgaaatgcaccggcccgctggggcgcatgggtgatggggtgccgcgctgccggtggtgcgctgcggcggcggtcgactggcattgcccgcattgcggctgcgagcgcatgcgcgtgatacgggttggcgcaaccggcaccgcccgcgagctgggcggcctgttccgcggtgtgtccgtcgtcatatcgtcgccgagccagccgcgaggcgtcgtcgagtacgtggatgatgcgccgcgcatcgtcatcgccacgccgggagcggagcctcgcgtgctgcctgcatcccgtcaatcggagcaggatgccggcgaatatcgtgccgtggcgatcctggacgcgtggaacagtctgtatgcgccgggtgtggacgcccgcgtggacgcgctgacggcgtggatgcgggtcatggcgttgtgtgcgccccgcactcgtggcggacagggtctgctgattggtgaatgcgatcctgcagtggcccatgcgctgatgatgtgggattcggcgtcgctcgcccggaacgaattgctggagcgtgggcaggccggcatgcctccggtgtgcgcggtcgcatgcgtatgggggcgtcgggatgcggtgatggccgccttggacgatatcggcgtgctgcgcggcgattgggcctcgctggatgttgcgggggagccgatacccggcatgctggggccggtgccgatagcggctccggtgacggtgagcgaacgcgagctggagagcatgcaggaccgggtcaaggccctggtccgtgtgccggtcggtatgcgtgcccaattgtccgtccgcctgcggtccgcggtggcgcgtcacatggcgtcgcgcactcccggcgaactacggttccaaatcgatcccaaggatttgatctgatccgagagattatccgccgcgtcgaggtgtcgtttcgaggaaagcggcggcgtgacatgtctgactgccgattgaatcagcattcggaaccttttgtttcggttggtgagatgagacggggattccttgattgatgtcggcgtatatgacatctgccgcgtagattcggggctgccgaaacgattcggacgaaaactttcagacgcggcgcttatagttgcatgccagaatgcatcggtgcggcggatgattcgccgcgtcgtctcgatggcatggaaccatggatgtgcgcggccgcgcgccgcggaatcgttcattggaatcgttcatatggatggaggcatcatgaagggttggccgggcgaaccggatatggaacatgacgtgctggtggcgcagggacccgccgcggccgccgacggcaagccgatcagcaacgtgattttcgacttcggcaacgtgctgatctactgggatccgtccgtcgtgctgctgcccaggtattcgcaggagaccatcgaccagttcctcgacaatgacatctccggcttctacgacgcgaacgaccgcatggacggcggcgcaagccccgacgagggcgtggcgtggatgcgcgagcattacggcgacaagtgggcggatatcctgcgctactatctcgacaatttcgaagattccctgaccggcgtcgtgccgggtgcccgcgtgctcgtcaacgatctgaaggccgccggcattggagtatggggcctgtcgaactgggagaaggaactgttcccgatcgcgctgaagcactgcgagatcctgcagcggctcgacggccgtctggtgtcggggtacgtgcacatgcgcaagccgcacaaggacatctacgagaaggccctggaagagttcggcatcagcgccgaaagcagcgtattcatcgacgacaaggcgatgaacatcgcgggcgcgaacgaggccggcatccgcggcattcgcttctcggatgcccgcaagctgcgcgagctgctgatcgagcagggcatcgatatcccggcggttcagtgacctccgcccgtccgcacgtcgcccggcgttcgacgatgatgacagggcagatggcctgaagtcccaataccgtggaaggaaacggaacacatgttgaaaatcctctttgccggcacgcctgacgtcgcggtgccgtccctgcgcgccctcgccgcggacagcgagcacttcgaagtggtcgcagtgctcacccgcccggacgcgcccaccggacgcggacgcaagctcacgcccagcccggtcaagactgccgcgctggaactgggattgccggtactggaatccgacccggccgagccgacgttccttgacgagctgaaggtcaccggcgcacaggccgccgcggtcatcgcatacggacgaatcctgaagcagtccgtgctggacgcgctgccctgcggctggtataacctgcatttctcgctgctgccgcattggcgtggtgcggcccccgtgcaacgagccatctggtcgggcgacgatatgaccggcaccagcgtgttccgcatcacgcgagcgatggatgccggcccgctgctggtgcaatccgaaacgccgatcggcgagcatgagaccgccggcgacctgctgacccgtctgggagaatcgggagcgctggtgctgcgcgacgcgctgcgcaccgtcgaggacggtaccgccgatcccgtggaacaggcggaaggcgattacccggtggcggagaagatccgcgtcaacgacgcgcatatcgatttcagtgcgccggtggaagcggtcgaccgtcagattcgcgcgtgcacgccgaatcccggggcatggaccgaactggatgcagacgggctcgggctcgacgacgggctgtccacgctgcacgtgctgcgggcgcacccggccgatatgaccaatccgaacgtacccgggtcgttggtggctggggcgctcgcagctggcaagaagaatgtctggatcggcacaggctccacacctctggaattgctggaggtcaaggcgcagggcaagaaggcgatgcgcgccgccgactgggcgcgaggagcccgactctccgaagccgcgcgctgccggtaacgaggtgcgcgttgcggactggaggtaagtgaaaccacccccagtctcgctgtcgctcgccctcgcctgcaaatggccctgccctttgctttacggctcggcccgccagcggggcaattatcacgctcccgctggagggagctgtcgcgaagcgactgagggtggtcttggcgctatcgtcgtgcgacgtcagcgcaggaagtccagcaccttggtcaggtcgcgctcgttgatggactcgtgggtggcgagctgagtcttcggcttggcgcagaaggcgatgccgagcccggccgcctgaatcatcgggatgtcgttcgcgccgtcgccgaccgccacggtctggctcatgggaaccccgtctcgggcggcccacgcctgcaatgcatgcagtttcaccgtcttgcacacgatattgcccagcaccttgccggtcagcgcgccatccaccacttccagacggttcgccagccaatggtcgatatgcccttcggcggcgagacggtcaacgacctcatggaatcccccggacacgacgccgaccttccaaccatgacggtgaagctcgtcgatcagcgccaacgcgccattggtgaagtgcagcttgtcgtgcacggtgtcgaacacgctcacgggcagtcccttgagcaatgcgacacgctcacgcagcgcatcacagaattcgatttccccgcgcatggcacgttcggtgatcttcgctatctcgtcgccgctgccggccgcctcgccgagctcgtcgatgacttcctcgtcgatcagcgtggaatccacatccatgacaagcagaccaggcttcgacagcgtcggcgcggccgcggtgccgtcacccatggtgtccgagggcgattggtgcgcggccgcgaacgcctccacgtcggacacgtcatacgattcgtcagaaggttgcaaagtttcgtcaagcataccgtcgattgtcggaaatcgttgggacaatatccggtatgcatgaatccctgcgcatatcggccttcgcgcccgctgcggtgcacggagcgggcgactccggctccgctgtcggcgccattgccaaggtcattgtggccgtcgcggccccggcgattcgccgggcgcgtaatctgatagggaagcgtgctcgaaaaaggggcgaacagtgaacgatatcatgcacgacggcactccggatggcatatggaattcgcaggaccatccgtcaggcctacctgattcagggccggtctcatcgtcgggcacgggtgccgaaagcgccacggcacgacaggacgcgaggaagatacgggagaacgtcgcacgtgagctggcggccgccaatgaccagctgatggccaagaaccatgcgctcgcgcaggcgctgtcgcgcgcgggcaaggaactcaccaaggcgaaggcgcagctgtcgcagatggcccagcccccgaagaccttcgcgacgatggtcaaggtcgactcgtcgatgaccgacgagctcggtgtccagcatgcgtcggccgagatcctgacgggcggcagacggctggtcgtgcctgtggccgccaacgtcaacgcgtcccggctgacggccggcgcctgcgtgctgctcaacgagaacatggtattggtcgagcagcgcggcacggacatgctcggctctgtccgcacgatccgccaggtgcttgatgacgggcgtctgatcgtcgcggatggcggcggcaaccccagcgtgatccggcgctcgggagcgttggcgcacgagacgttcgccaacgggcagcgcatcatcgtcgacccgtcgggccggctcgccctggaactgctgcctgacgagaacgatgccgacctggtgctggaggaggttcccgatgtcaccttcgccgacatcggcgggcttgacagccagatcgaacgcatccgggacgccgtgcagctgccgttccttcaccgcagcctgtacgaacggtacaatctcaaggcgcccaagggcgtgctgctgtacggccctcccggcaacggcaagaccatgatcgccaaggccgtcgcccatgcgctttcggatggtttcggcaggggcagcggcgtgttcctctcggtcaagggcccggaactgctcaacaagttcgtcggtgaatccgagcgtctggtgcgtcagatcttcacccgcgcgcgcgaacgcgccgcggacggccggccggtcatcgtgttcatcgacgagatggattcgctgctgcgcacccgcggcaccggcgtctccagcgacgtggagaccacgatcgtgccgcagttcctctccgaactcgacggcgtggagagcctcgacaacgttatggtgatcggcgcctcgaaccgcgtggacatgatcgaccccgccgtgctccgcccgggacgactggacgtgaagatccgcgtggaccgccccggggcggatcaggcggcatccatcattcgccactatctgaccgacgacctgcccctgcagcccggactggacgccgacggcctgtcgcgcgttctggtgcgcgacatctacacgcgctcgtcgcgacggcacctgtgcgacgcgtgcaacgaccaggggcaatggtcggccatcttcctctccgacgtcgcgtccggtgccatgctcaagaacatcgtcgaccgcgccaagacgaaggcggtgaaggcgtccattctcggcggcgacgacgtggcgttgaacgtcgagctgctgggagaggccgtggaggacgagttcgtggagacacgagggtcggtaatggacgtcgatccggtgcaatggtcgagaatcaacggcatggacaacgggcgcgtggtccgtatccgtccggttccgcgcaaggaaaaggagaacatgcaatgaccgtgcgacgggtgatgggcacggagaccgaatacgcggtctcggcgcccgctgtctcacatgccaatctggtgcagctgtcgttcgacgtaatcggcgctgccgccgaccccgaacgttcgcgcatacgctgggactatcgtcaggaggaccccgtcaacgacgcgcggggcacccgtctggagagggccgcggcccgccccgacatgcttaccgacgagccgcagctcaacatcgtcaacgtcatcgcccccaacggcggccgcatgtacgtagaccacgcgcaccccgaatactcggcgccggagaccaccgacccgttcgaggcggtgcggtacgaccatgccggcgacctgctgatgcggcgggcggccgcgtcggcgagcgcgagaacggggcacgacatcgtcctgcaccgcaacaacgtcgacggcaagggcgccagctggggcacccatgagaactacatgatgctcagatcggtgccgttcgacacggtggcggcgctgatgaccgcccatttcgtctcacggcagatatacgccggatccggccgcgtcggcataggggagcgcagcgagaccgccggataccagctcagccagcgtgccgactacatccacgcgatcctcggactgcagaccaccttcgaacgccccatcgtcaacacgcgcgacgaatcccacagcccatccgattatcgtcgcctgcacgtgatcgtcggcgacgccaaccgcatggacgtgccgcagacgctcaagctgggcgccaccagcatgctgctgtggctggccgagcacgcggacgagaccggctatgatctggcagcgctgctggactccatggcgctcgtcgaccccgtgtcggccatgcacacggtgtcgcacgacctgacgctgcaggccgagctgccgctgcgcgacgggggcgtcaccaacgcgtggatcatgcaggtgaggctgcgggccgccgtgtacgagatgggggcgctggtgtacggcaccgacacgcgcggcgagccgctgtggccggacaagcccaccaccggcatcatggcgctgtgggggcaggcactcgccgacgtggccgccatccggcatgccgacgacgatacgagactgaatatgcaacccgaggcgtcgcgggtggaatggctgatgaaatggcagctgctggagcgtctgcgccgcaggcacggtttgtcgtggaacgatccgaaactgcgggcgatcgacttggggtgggccgccttggacccggtccgctcgatattcgagaaggtcaggtcgcgcaccgagcgcacggtcgacgaccggcaggtcgccgatgccgctggcaatgcgccgcagaccacgcgcgcatggctgcgtgccgcggtcgtgaaccggtatgcgagccaggtggtcgctgtctcatggtcccatctgaccgtccgcaggcatgatgcgccgcagacgggggaggagtcgtacggcaatgcgagccgtccgatcgtccggccgtccgacctgtgctcgctcgacatgtccgatccgtgcgccttcgacaaggcgcacatggccgcgttcgtggacggcacgcgaaacgccgatgagctgataacgcaaatcgatcggaacatcaccgccggaaggtaatatcgatacaggcatgaaatggcattaccgtgagcgcaccactggccgatgcgcatcatggggcagccatgatggcgagcgatgacgatcaaaggcgcgaacgccacgaccagagacaacgaccgacagacgaggttgatacagacatggatttgcgagagatgacacaggccgtcgcccaagtggcgcggcatgccggcaggcacgcccttcaggagcaggtgaacccccacgacctatccacgacgatggtgtcgcccggcgagacgaaattcaccagcgaggtcaacacccggctgattcgctatacccgcgcgcggctgtccgaaatcgaaccgttccagggcttctgggaggagcgtccggaggacaaccagccgggggagaggtactggtgtgtcggcaatatcgacggagccatcaatttcatccgcaacatggccgaatggaccgtgaccatctcactgttcgagttcgacgagcactgccatgcgcgcccgatcatgggtgtggtccatgcgcccgccatgggcatcacgtacatggcggcgaagggccagggtgccatcaggatacgccgcaaccccgtgggcggcgacaagcgcgagaaggtcatgccgtcgatcactgcgacgctggatggctccgtggtcagctacggcatgtcgtatgtgccggaggagtccaaacgggccctgtccgcggtagcctccatcgcgggtaaaccggccgatatcaagcgagtgggtccggcttcgatggatttgtgcaaggtggccgacggcacgtacgacgcctatttcgagcctcacctgcacaagtgggatgttccggccgtctcggccggcgccgtcgtggtatgggaggcgcaggggcgtctgagacagtggaacggcgagctgatccattggcgtcgcgagaacgatgtcgtggcgtcgaacggcctgatcgacgacgagctgcagccgtatctgcagtgatcgggcgcatacagacatatgcaggcgtctgccggcggtgacgaatacgtgcgtgcgtggcagatgtctgcgattcggtgacggcatgccggatgtccggcctgtgccggcatcggcggaagaagaaaaccggaaggaaagggagggacggatatgcctcaggaattcgctcacacgcagtcgtcctcgcagaagcaggacaccgacgaacagctgaatgacgtgtcgatggcggcacaggccgagaccgacgcggccgtggacgctctcgacgcggtgctggatgacatcgaatccacgctggaatccaacgccgaggagtacgtgaacagcttcgtgcaaaaaggcggcgaatgatgccgcagctgcgtgacagcggcaatcacgggagttggcaggaagcgcggaggtcttcgcagttccagggattcgcccgcattttcggcgtggagacggagtacggcgtatcggtgacgggttcggaccatccggtcgacgcggcgcaggtcgcgatgatgatgttccagcctgtcgtgtcccgcgcgcgttccacgaacacgtacctgaccaatggttcgcggctgtatctcgacgtcggctcccacccggagtatgcgaccgccgaggcccgcgatccgatggacgccttgctgcaggatctggcgggggagcgggtcatggccggattggccctcgacgcgcaggcccggcttcgtgccaggtacggggacggcgtgaacgtgcacgtgttcaagaacaacgcggactcggcgggccactcgttcgggtgtcacgagaactatctcgtacgccgatatgtgcctctggaaaccgtcgaacacgagctgctgccgttcctgataacgaggcagctgtacaccggagccgggcgggtcaccgatcagggattcgagatcacgcagcgggcggactatctggatgaggcggtgtcatcggcgacgacgcggtcgcgccccatggtcaacacacgtgacgaaccgcactcggatccggatgaattccgccggctgcatgtcatcatcggcgactccaatcgttcgcaatgggcgacatggatgaaactcgccgtgacgcatctgattatctgcgtcatcgaggaggccgcccggctcggtgaggattccggtttcgcgtcgtgcgcattggctgatcccggtgccgcgaaccgtgcggtcagcgccgatctgacatgcgtgaccgcccggcttcgtcttgctgacggctccgagccggtgtccgccgtgcagatgcagcgcaggtaccaggccgtcgtccgtgatttcatggaacgtcatcatgatgccgttgacgacgcactgccgcgcacggacgtggatcagattctttccgcatggtcgttggttcttgaccagttggaggccggcgatgtggaagcgttgtcggaccgcgtcgactgggcggcgaaataccgcctgttccaggcgctgaaacgccgcaagggcgaagtgacggacgccatgcgcgaacggctggacatggattaccatgacatcgtcaacggttcgctgtatccgtcaatgctgcgtcgaggcgtgatgcggcagctggccacgccccggcaggtggagcatgccgtctcggaaccgccggccgatacccgtgccgcgttgcgtggggccttcgtcgccaaggcgctgtccacgcaatgccggttctcctgcgactggacgcgattgtccgtcatggctcccgaacgcagcgaagtcgtgctgctggaccctttcgaataccaggcgaatgccgacgtccaacacctgatgaacctgctgtaacgccccgctggcggctgagccgtcggcgaagtcgaccggggggcgccgaccggaggcgccccagcccaagcccagatacgaaaaagcccctgactcttcattggtcaggggctgtatttgttcaccatgatatcgaaatcggtgacaatggcacgaaccggacttactcggtcacggccttcttcagcagggagccggcggagatgcgcacgccgtaggtcgccgggatctcgatgatttcgccggtgcgcgggttgcggccggtgcgggcagcgcgcttgacgcgctcagcggagaacaggccggtgagcttcaggccttcgccggactgcatggcctcgacgaacacgtcctggaaagcgttaacggcggcctcagcctgagccttggtcagattggacttctgggcgatcttcgaaacgagatcagacttgttgtatgccataaagcatccttctttgatctgggggcttcgattgccgaatccccggtgttcatcaatgatgatagcgcatgatgtaggcaaacgccgcattttttaagggttttccacactttttccggttgttgggcggttatatgagattgtgtttgtcgagccagcgcatggacagcgcaccgagggggattcgcagccagtagaacagcgcacggtacagcaacgtcgcggagagcgcgatgcccgcgggcacgcctgccgcgccgaacgagaacgtcagcgccgcttcgacgccaccgaggccgccgggggtcggcaccgcggagccgatggcattggcgaccaggaagatgaacagtgtctccagcggattggtcatctgtccgaacgccagcagcgccgcccagaattccagtccggtggccacgttgaggatcagcatgcccagcacgctgaacgacagctccttgggattggtgagcacgtcgatcagctgccgtgcgtaggccttgaccaggggcagcagcctgtccgtcgcgtaatgccggatgggtgggatcatcatcgccacggcaagcgccatcagcacgatgccgacgatgacgatcagggtgttcgtcggaatcatgctgctaagcgcgtcgctgcctgtgaatatgccgatgacgaacagcatgagcactgtgccgccataatacactgccatgacggcgctcatgatcgcggtggcggtcgtattgcggtagccgcttttgcgcaggaactgtaggttcacgaatgcgggtccgacgccggcgggcatggacaccatcgcgaatccttgcgcgacctgtgacatgaagatgccgagcgggttgcgcttgtcgcgttcgatgaaggccccgagctccagcgcggagccgagcagggcgatgagttcgaagatcaggcagacgatcgccatcaccgggttggcgttcttcaccgcggagatgacctcgtcgggcttcagttgggtgaagatcaccacgacggcgacgatcagcagcaccatgccgataaaggagcgcgggctgaaccgggacagggacaccggctccatggcctcggcggtctcctgcggggccagcgcgcgcatctcggcgcgcatgtcgtccacgatgtgcttgttccagcccggcagggcccgcgtgccggcgggaacggccgccttctggatgaatggggtcagcgagatcatcgtgtcgtcgccgagcacgtcgcggcctgcggtgaccgcgcgttcggggccgatgagcacggcgagcagcaacagcagttgcacctggtccagtgcgatgttcggggccgcgctggcgtcgtccccgttctgccatccggctatgatcggcgtgccggattccagtcgcgcgagggtgtccggcgtgatgcggcgatgcgtgtacccgcgtttgttcgccaccgacaggaaacgcagcaatgcgatggcgtccttgtcggacaacgtgttgaggttgcactcgtgcatgatgtcgtcgccgtgcagcaccaggatcgaagtctcgccggtgtcggccacgccgtagatcttgggggtgggcaggcccgcattgcgcaatcccagaatcatcgccatatggtgctgggtcgcctctctcggcgagcggtcgcgccgcatggcgacgccggtgaaccggacccactgccacagctgtttgacgtagcccgccgtgcgcgcctggctgtccagagcggagacgacgaaggcccgtccccaatcatccactgcgtcgtacagtcgagatccttcgaccagatcgtcgtcgagggtcgaggcgagggagccatgggacaggtcgacgtccatgcggcgcttcagcgaggtgatatgcagtccgatgccgttgagcgcctgcacgagatcctcgccccatgcgccctggttcttggtgccggctgcgaaccggatcagcatgccgaccagccggcctacggacagggacacgataactccggtcacggagttgatcgacagcaggatcaggatggccgacgagatgtagaggatgttccatccccatttgaccgtcgatcgtgtacgccgaggccccgcgacggtcaacaatgccgcggaacccgcgtagaagtccggcagcagtcccgttccgatgatcgagctcggcgaacacagcgcggtgataagtgtgaagttcccgaaggtcgacacggccatcgatatgccccagacggtcgctaggccaccgaacatggcgagtagggccaacgccgattgcagccactcccgtcccaccagcagctggacgatggccataacggcgatggtcacgatggtcagctgctgcagcatcgaggtcggaagatcgaccatccagttcagtgcacgtccggcgctgtgggcatcggactcgactcccgtgacgaaaccgctcaggtagatggaggacagtatggccaccgccgcgagcagcacggcggagacggcgtggaccagatcgccgaaatcgtggatgcggcgcggtgcgacgtcctcgatgaccgggtgggccgtggtgccggatacgtcgtcgctcatcggacgcgcgtccggcgacgccttggaatcgtcatcgccggacgttgcggttatcgtctgatcgttcatcaccgttcctgtgctgattgatcgtcgatggaaatgggaattatcggacggctcagcggtcgaagtcgaccagcgcgccggcgacgcccgtgtaggtggcgggggtcagcgccttgagccgcgcggccgtggcggggtcgaaggactgctggtcgatgaagcgctcgaccgcctccttgctgatctcatggccgcgcatgagttccttgaccttctcgtacggcttgtccatgccgggcaggcccttgagctcgcaggcgcgcatcgcggtctggatcggctcgccgagcacctcccagttggagtcgagttcgcgttcgatgacgatgtcgttcggatggatggacttgagtcctcccatcaggttgtacagggcgagctgcgagtagccgagcgccgaaccgatgttgcgctgggtggtcgaatcggtcaggtcgcgctgccaacgggactccaccagcgtggcggagagcgtgtcgagcagcgaacaggacagttcgaagttggcctcggcgttctcgaagcggatcgggttgaccttgtgcggcatcgtggaggagccggtggcgcccttgacgggcacctgggcgaacacgccgcgcgagatgtacatccacacgtccacgcacaggttgtgcatgatgcggttcgcgtgggagacggtcgagtagagctcggcctgccagtcgtggctttcgatctgcgtggtcagcgggttccaggtcaggcccatgcggttggtgacgaactcgcgggagacggcgatccagtcgacgtccgggcaggcggccagatgcgcgccgaaggtgccggtcgcgccgttgatcttgcccaggtactcctggttctcgatgtgcctcagctgacggttcagacggtaggcgtagacggcgagctccttgccgagcgtggtcggtgtggccggctggccgtgggtgagggagagcagggccttgtccttgtattcctcggccttggcggcgaggtggtcgatgatctccttgaacgccggcgtccatacctgctccatcgcgttcttcacgcaacgggcggtggacaggttgttgatgtcctcggaggtgcaggcgaagtgcacaagggtcttgagcgcgtcgttgatgtgggtgagctcggccggcgctttgtcgagctggtcgtcgatgtagtattccacggccttcacgtcatggtgggtgacggcctcgtgcgcggcatgctgcttgatgccttcggcgccgaagtcctcggggatggcccgcaggaaggcgatctcggcgtcggtgaacggctccacgccttcgacgatcggctggttgccgttgccgtcgaagccgttggccagcaggatcatccattcgacttcgacgcgcatgcgctcgcggttcagcgccggctcgctcagatattcgacgagaggtgcggtctgcttgtggtagcgtccgtcgagcggggtcaatgcaattgcgggggtgatgtcagtaagcttcatagcatcccagattacttccagccgtaaacctgatgcgaaaccgatgcatgttcgtttcgcccccgttcctgatgccttcttcgtcccggcatgtcgttctcctctcgttttcgtctgctgactgctgttttcccgtgtttccggtgcgtgcacgcccgtcattcatgcgacatgcgcccctcgtagtatcgggtgtcgatgagttcgccgtcgatgatctgctggaaatgccgttcgtgcgcgtccacggcgggcgagccgagatcggtggcgttgcggtacgcggcctgatggtatttgagccaatgggatatctccttggtcttcggcgcgtcggccaccagtgctccggcgtagttcgactcggccgaaccggtgttctggccgggtgtgcacgacccgtcggcgttcaccgtcggcggcgtgacgccggtggtctgcgtgactttgccccttacggtgagccattgttcggtcgaagggttgcggccgccatcgagcgaggcgacgagctcgtcctcgatctctatgctggtcacccaggtcttgggcggtatcggatgattggcgacaggagagccggcggtcaccacgtgatcgatggcgtaggagtccttcaggtcggaggccagggccgcggccacgatgccgccctgggaatgccccaccaatgccaccggctcgtccttgccgatgccggcttgtttcatggcttcctcgaccatgcggaagctgtccgcgttcctgcgtcggttggcgttggagctcatgagttcgaggttctgctcccatccgaacggcgaatcgtcctgcccgtccgtgcccggtatcaggattagccagcctgtcgtcccatcggagcggcggtatcgctggaccgctatcgtcgcataactgagtccgctgttaagggtgatcttgcccaggcgttcctcggcgagccgtcggaggttctccatggacgaggccacggaatgcgaggccccggccacctgagacgtggattgcacctcacgcacggtgagtttgttgccctgcatggcgttcttgaacttcgacgtgtactttgcgatgcgttccgcggcgccggcgacctgggtaccgccgaggatgtgcgcgatgcggttgttcgtgatgcgtcccgccagcgatgccagcagctcctcatccattttcgacgtggcatcgagcgcccgcacggggttgagcttgccgtccttgatggagcctgagacgaatccgtagagtgacagcatccccagcgtgttccatccgacgctgggcagcacggtcgtcatgatctgcgcggccttgcgaagtttcgtctccgccttggtctccgcttcgtcatacaggctgtgggcgcgggcgatcagatcggcgacctgttccaggtccccggcgagcgtggcgcactcccgcgcgtgggtgacgcattgctccagcagacgcgcatatggcatggagacgtgaccgggttctccatcgccgccgctgccggccaacgcagggcagagcgccgcgcccgcacggtcctttcggagctggtcgtggaccaccgaccagaagaaccccgcgcccttcatctcctccgcctgattgcgcagcgatgccacggcggccgtatatcgttcacgggttgccggggcgtattgcgtgcctccgtgtatcgacgaagtgaccatccagttcatgatgagcctccgctccaggcgagttgcccggtctgccgcacgcggtcgtcgatggatgccgccaacctcgtatcgcggtccaatgctcgtgcgcacagtgtcgccgcattgccggtccaatccaggttcttggcggcggccatcgcggttctggactgttccagcgcgttggaggtcagccgttgcagggagccgatgcgctcccggctggacccgacagcggtgcggcaagggcagtcggcgccggcgatcgacgccatcgcgttcccccatatcgggaacgcgccgttgaagatagtgcaagtgttcatggttccatgaacgcatgcacggccatccgcgcgcaagcggagcggaacatgtggtcgaaggctcccgacttatccacacactcggcgtgtcatccacagcaaatgtggacgacgagaccggcgccgtcgcggagcactgaatggagtgatgcgcaatggtgccctcgctggcgggctgagccgtgaagcgagtagaggggctgtttgcaggcgaagccgcctggggcggtcccgggtgcctctcatccgcagcgccacttgtgccgtggcccgtctttccatcaggggagaatcgacctgacttcgccgccgattgccgtgctaaggatgctgtgccgggatggccacaccaggggaaaaacatgggaaaaatgcattgtgtggcttttgtcgtgccacacaatggaatgtgagccttctcattacgtggtatggcagaaagcgaatcacagaaaccgccattttccaatgattcgggaaaacgctctgataccggcgttgccacaccagcccaaaaaccgtcgaaaatcgtgtggtgtggtacacgggcagccggaaccggacagctggaaccaggcggcgcccgggccaatcaccatggcttggtggtggagtttgtgttggaggagcttttgcccttaccgcctttggagccgttctgcgagttggactgctgattcgacttcagtaggtcgtccacttgcttgcgctgctcctgcgtcagaccgccgctctgcttggcgttgccgtccgatccgggcgcggtctgcgcgttggaggtttcggtgttttgctgcttctggagctgcgcgttgatgcgttcggtcagcgtggcggagactgacgcgttggtgtcgatcacgttcttgacttgcggcagtagcaacgcggaccatgcggccgcgtctgcgaacctggcgtcggctttttgctggagtgcgctgagcgtcgacaggtcggcgtcatccttggaagcggccttcagattgccgttcagttgcgaggtggcatcgtcgaatgcggtgacagcgatgaggttcgcgccggccgcgatgcccgtgcacaggcaggccatcgcgacgatgccgatcaggatgcgcgaccatagcggagtgcgcgctactgcgcggtctttcgcctcgcggccgttcgcctcgcgcttcttcactgtgttgcttttcatcgcacgattcgttgatttccgggatttcatagcatcctccgtgacatggcgatccatgcgccgatctcccaggcgagcagcaggcccagcgccacggcgaacggccatatcacgggaatcgtacgctcccgccgtttgaccgtctgggtgagcctccactgtcttgatgccttggcggacacggcctgttcgatggtgtgcgaggcgtccacgtgcaggtatgagccgcccatctcatcggcgatggattccagcgtggcctcgtcgagcttggatattcctggcttgccggtcgtcgggtcggtcacccactgcccgtcggattgctgtcccgttgctgtgccgtcgctggccatcggtatcttgccacccgcatcagagcccacgccgatggtgaacgagtcgtcaaggtaccgcctcagcgcagaatagctacggcgtgcggtgtcggaggtctgctcgccgtccgtgatcacatacagcacgatgatgtcatcgggatgttgatccctgattgatttgagcgacagcatcagctggtcgagcggcgtgtcgagactcgatccggccgatgtggacgtggattcgacggccagcgtgtcggcccagccatcaatggcgatggagtccggagtcaacggcacatccagggtgccgctcgcgccgaagcgcaatgcggcgaaactggaatcggcgtacgtcgacgtgatgcccttcacgatgcgcttggccgcgtcaagacggctgattgtgcccgaggagccgtattccgcgtccttgaccgccatcgatccggtgacgtcgaccgccaccatgacatcggtggcattgatagcccggctggtggtggtcgtcacgatgctgggcgtcagcatcatcacggcggcgagcaggaacattatcaccctgcgtatgcaggcggtcagcgtctcatcgctggagcgcctgcgccgcacatgcacgacgaccaccgcgaccgcgaacgccagcatgagcgccgcgatcgcgccgcccgcgatccaacccagagccggggcgaatgtcatcggtctcatcgtctcaacctccatgccagtatcatccatatcgcaagcagcacgaccagcatcagcgtccaccatcccggcgcgtcgatcagcgcggcctggcttgaccgtcggctttcgctggtacgccggctgtcaatccgcctcaccagctcgttgatgtcggatgagcccgactgggtgaggaacgttccgccgcgggactcgatctgctgcttcatctcggtggttgtggcgtcgccctcgctctggcgtggcccggagaacaggccgtccacgctgatatgcgaggcttcggccatatcgagcgcctgggcgagtgaatacgtcggcgtgccggacgccacgttgtcggtggcgagcacgatcgaggcggggcgctgccgtgcggcgccggacgtgtcgccataggcgaagccgggtatcatcgcggcgcagctgaccagcccgtccccgatcagtgatgtcgagttcttgcggttctgcgtgccttccagccaatcggcgatcttctggtagtccttgtcgctcatcttgtcgatgtcgtcctgcgattcgacgccacggagcgcgtccgccgccttggtcagctggctggagaccaggttgtagtcgtcggtcagggggaacaccgtgcgcgatgtcgagttgaagatgctcagggcgatgcgttctccctggaaatggctcaccagttccagatatgtttcgatgaccgcccggtcataggggagcgccgaacctgacacgtcgaggcacaacacgatgtcgcgactgctggagcgttccgcgtcgcggtccacatgcgccggtctggcgataagaaccgtgcagatggccagcgccgccaccagcgccgccacggcgatccgcccgagcaatcgccacagatggaacagatgcgatgcatgctcggtattgaggtcgtcgtcaagactgtataccggcatgccgtcccgcgggggacgcctgcggcctcggaagatcgcgatgacggccaccagcactgccgcgacgagcccggccgccacggcggcatacggccacagccaatggatgctcatgtcgttcgtggtcatcagcgccacctttccacgaggttcagcacccagtcggcggcctgttccacggtggcgtccttcgcctgcgcgttgaactcggcgttcgcgaactccggcggatacagcgcggctatggtctggcgcagcagcgtgaaaccgtggactcccgaatcacctgccagggagcctgcggaacgtgacgcgatctcctgcagcgtcgtcggaccgagctccgcgctgctggcctgcgacgcgaagtccctcgccacggcggcgagctcgacgaaggcgtcctcgcgcgagagcttcccggccccgttgcgctccacgatgtcatgcacgcggcttttccattgcgagacgggggcgaaggcgttgtgggaccctcggggagcggctacgcgtttcgcacgtcgaggacgggacatgatgacgatcgccacaatcaggatcagcaacgcgatgaagcacgccatcgtcactatgggcagcagagacgcgacgggcacgtccgtcacgggatgcaggtcgttcacgtccacggctgcggccagcgtcgacgaggtcacgaaaccgttcatgacgttcatgcaggcacctccgacgtcaggttcagcgatggcggcacacgcagctgattgcggatggaacggccgagcgaacgcgacaccagccgcacgaaggcatcgaacatcatgtcgctcgacgcggcgcggatcattcgcgaaccacgtttggcgagttcgtgctccagagcggcgcacacgtatctgcgatgcagcgccacctcttccgcggccttcgcgttgcgcagcagggcggggatgcggcgcccggattttccgtcataccattcgcgggcggcctcggacgggtcgaaggggttggccgtcgccacggtgatcagcaccacggggtgggtggcggctatggcgccgatgacgtcgatgtgacgcttgcgcagggccagctcgtcggtggcaagcacgatgagcgcctgacggtcgcgtatgcggcgcgcgtaatccagcagagcgtcgatgttgcggccgtatgaccaatcccgccgcaaggcgttgtccagcgtgcgctcgaactgcgcgaacccgccgttgaacggcatgcgcgtgatgctgtgggcgtcggcgaacaccagggagacgtcatcgctgcgccgcagcgacagcgcggcgaacatgcgcagcgcgttgcctgcgaccgcgtaggccggctcgcctgacgcgcatcctccggtcatctcctcgccgacatcgcacagcagccacacttggctggtcgcctggcgcgcatgctgcacgaccatcgggcgaccgagacgggcgctggctttccaatcgatgagacgcgcctcgtcccccggcccgtagacgcggatgtccatcgggtcgtcattgcctccacgccggttcgaggcgtgctcgccctccaggacgcccagcgccttgcgaacggtcggaaggctcagcgaattgcccagcgcctcgatcttcctgcggatccggtcgtcggaagatgaggagtgtgaggggtgtgagccatcgatcatgggacgtgaaccgtttccacgatccgatcgatcacctggtcgctggtcacaccgtcggccagcgcctcgaaggtcaggatcacacggtgcctgagcacttcgtggaccatcatcttcacatcctcggggatgacgtaatcccggccggcgagcagcgcgttggcctgcccgctgcggatcagggcgatcgacgcgcgggggctcgcaccgaggcggaccgtcgagctcaggcccttcagcggcttgtttccggcaccgcgcgaggtcgccaccagatcgacggcgtagcgcatgatcgcctccgacacatggacgcgccgcgccgatttgcgcagaaactccacatcctgaatggtgatcgtgtcggacggcagtgatttcggatcgaacatgtcggtgccgcggcgcgtgagcatcgccagcatgctcgtctcctcgtcggccttgggataggtcatgacggccttcatcatgaatcggtccatctgggcttccggcaggttgaacgtgccctcctcctcgatggggttctcggtggcgattaccatgaacggcttgggcagctcgatgcgttcgccgccgatcgtcgtggcgccttccgccatggcctcaagcatcgccgactgcgttttggcgttggatcggttgatctcgtcgagcaatacgaaattggcgtggatcgggccgatctgggtggagaaccgctgggtggagaagtcaaacacctgggtgcccaccagatcggacggcatgaggtcgggcgtgcattgcactcggcggaacgttcccgagaccgaggtggccagcgtctgggccgcggtggtcttggccaggccgggcacggattcgatgaggatgtggccgcctgcgaccatcgtggcgatcagcgcttcgcgcaagtcggactgtccgaccagcgtctgggcgaatctggcgcggatgcggtcggtgagctgccgtgcgcgtcgcaggtcatcctgcgtcagcgcggcggaaggcgccggcacgggcgtgcgcatgggggcggccggcatggcgcccgtcgtggggatcgcgttcgcgagctgggacggcattgaaggtttcgaggtgaataaagccatgctgcccaccttaccgtgacgaagcaaccgcggagtggggatcgggccgatccgcctgcgccgatggcagtgaccagtcgaccggttccgcgcccatggagaccagtgcttggttggcgcgggagaacgggtgggagccgaagaacccgcgggatgcggacagagggctgggatgcggcgaggcgatgatggtcgcattggtgagcagcggcgcgaggctctgcgcgtttcgcccccagaggatcgccaccagcggcttcggcttgccgtccgcgtccacccgggcgttaagggcgcggatggcggcctcggtgatggtctcccatcccttgccctgatggctgttggggcgtcccacgccgacggtcaggcacctgttcagcagcatcacgccgcgctgggtccaaggtgtcaggtcaccgttgtcgggcatcggcacgtgcatgtcgtcgacgagctcgcggtagatgttgaccaggctcttcggcagcggtcggacgtcgggcgccacgcagaagctcagaccgaccggatgccccggagtcgggtagggatcctgcccgacgatcagcaccttgatcgagtcgaatggaattgtgaaggctctgaggatattatggcttgcgggcaggtactgacgtcctgcctgcagttcggagcggaggaaatcgcccatgtgatggacctgcggctccacgtcctgcagcgctgcggcccatccgggctccacgagctgcgacaatggtttgactggatgttgactcatgatctctactgtagcgagcgtgtcgaagctgtgcatatccggtgcatgactgacggccgtcgcgcacttgggacaccatggccggtagacttgacgaacgatacggaagggtgattatggccaaggacaaggaaacatacgattcgtatgccaaagacgtgttcgacaatcctccggcaggtccggtgggcgtgcatcggggcgcgcggtcggccggggcgcgcatgacgcctttcctgatcgtgctgcttgtggtggccctggcgggcgtcggcacatggggtgtgctgtcgggaatgttctccgacgtgctcttcgggaacaacggcacgtcgcaggcggctgacgacaaggcgtccgacagcgacgactcgaagaccggcgacacgacgaagtccggcacgggcgagcagtccacttctagttcgactgacggttcctccgacacggcttccaatacctccacggattccgcccagagcgatacgacatcgagcagcagcgacggttcgaccgatgccaccgacacgaacgggcaggggacggactccaccgcctcgtccgacgcgcattcgacaccgccggccaccgccgaggcgaacaaggccacttccgtccgcgtgatcaacggaaccaagatctccggtcacgccgccagccgtgcgtacacgctcaagcaggccggatacaagaacgtcgtctccgccaacccctccggtacgttgcccgcgagcaccgtggtctggtaccagaacgagaccgatgcggcgaccgcgaaggacatcgccgtgaccttgggcatctccgacgtgcggcagatgtcgggcatctccgcgcccgtcgtcgtcgtgctgatgcagtgaccgtacatcggccgagaatccgcgtccccgtagactttgtgcgaatgtcccctagtaccgtacaatgatatggagtcgcgaggtggggatgcggtgcggttttgagctctcttccgcttgttcgcggcataggaacaagggaaagaatataacaatggcacagggaactgtgaagttcttcagcgctggcaagggttacggattcattacctctgatgctggtggggatgatgtgttcgtgcactactcggttattcaagccgatggtttcaagacgctgaacgagggcgataaggtcgagtacgaggccgaacgtgggccgaagggaatgcaggccacgaaagtggtcaagctctgaatcgtgcgaggctttgcgcgtcatcgaagctccggtacccaatgggtgccggagctttttccttttctttcggctttaccggatcggtatcggcatgctacggccttcgcggatcacgcgatgatttcaagccaacagcgcaatcctcgtgaatatgttggcactcgggcaccgagagtgctaatctcccaattagcactcggggagtgagagtgacagccggcagctgacggtcggcggccacgcctcgccccaggtgagattcagtaccgtgaagccatttggaggatacacaaccatggcaaagatcattgcatacgacgaggaagctcgtcagggcatgcttgcgggtctcgacaagctcgccaacaccgtgaaggtcactctgggcccgaagggccgcaatgtggtgctcgacaagtcctatggcgcaccgaccatcaccaacgatggcgtctccatcgccaaggaaatcgatcttgaggatccgtacgagcgcatcggcgccgagctggtcaaggaagtcgccaagaagaccgacgacgtcgcgggcgacggaaccaccaccgccaccgtgctggcccagtccctcgtgcacgaaggcctgaagaacgttgtcgccggctccaacccgatcgcgctgcgtcgcggcatcgagaaggccaccgacaccatcgtcaaggaactggtcgccgccgccaaggacgtggagaccaaggaccagatcgccgccaccgccacgatctccgcagccgaccccgaggttggcgagaagatcgccgaggctctggacaaggtcggtcaggacggcgtcgtgaccgtcgaggacaacaaccgcttcggccttgaccttgagttcaccgagggcatgcgtttcgacaagggctacatcgccccgtacttcgtgaccaacgcggacgaccagaccgcggttcttgaggatccgtacatcctcctgacctccggcaaggtttccagccagcaggacgtcgtccacatcgccgagctcgtcatgaagtccggcaagccgctgctgatcatcgccgaggacgtcgacggcgaggcgttgccgaccctcatcctgaacaagatccgcggcaccttcaactcctgcgccgtcaaggcccccggcttcggcgaccgtcgcaaggcgatgctgcaggatatggccatcctgaccggtgctcaggtcgtgtccgacgagctgggtctcaagctcgactccatcgacatgtccgtgctcggcaccgccaagaaggtcatcgtctccaaggacgagaccaccatcgtttccggcggcggcgacaaggccgacgtcgaggctcgcgtggcccagattcgcgccgagattgagaagaccgactccgattacgaccgtgagaagctgcaggagcgtctcgccaagctggccggcggcgtcgccgtcatcaaagtcggcgcggccaccgaggtcgaggccaaggagcgtaagcaccgcatcgaagacgccgtgcgcaacgccaaggccgctatcgaagagggcctgctgcccggcggtggcgtggcgctcgtccaggctgccaagaaggccgagtccgcagaagccgtcacttcgctgaccggcgaagaggccaccggtgccgccatcgtgttccgcgccatcgaggccccgatcaagcagatcgccgagaactccggcgtgtccggtgacgtggtgttcaacaaggttcgcgagctgccggagggtcagggtttcaacgccgccaccgacacctacgaggatctgctggccgccggcgtcgccgacccggtcaaggtcacccgctccgctctgcagaacgccgcgtccatcgccggcctgttcctgaccaccgaagcggttgtcgccaacaagccggaaccgaaggccgccgctccggccgccggcgccgacatgggctactgatccgctcccggaatccgccatcgcagcgcggtagcgcgttgcagcagcggatgccgtaacacggatttgctgcgatgtgaagggcttcgacctgttgagggtcggagcccttttcgcatgtctgctggcataccggagcggatcaccgccgtgatactgttcagccggaagcgaacagtcgggacgcctgcgcttcggcgtcggcgtagacggtggatgcctgggtgagcgcctgctggatggattccagcgacgcctccatctgctgctgtgccgcacgccactgcgcgctgaccgaagtgaactgcgtggcggcaccgccacgccaggcgtcctggagcccgttgaggttcgtatacattccgttgaccgcctgccggatggcggcgatggacgccgaaacggcggcggaggaggattggatccgttcggaatccacttgatattggggcatggttgttcctttcctgtattgttctgttttcgcccggtgacgttgaagcgtccggccggtaatgtggaggatatgacattgcgaacgatgagatacggaaaaacggatgatgtggtcgaaggctcggccattttgggggttatcggcgtgtcgcgcgacggattttctctgtggaaacggctgttttccgcggttttgacggtgctggtcataacaatgtggataacttcgcccggtgcggtcgcatacgccgccggggacgattcgtcgtcctcggaccaggggcaggccacgttctcccaggacataaccgatccctacaacgtgctcggctccaatctgacgaaagtcacggacgccatatccagcacctacgacagcaccggcgtgtcggtcaagctgtcatacatgctgcatttcgagggggtagaggatcccgaccaatgggcgcaggaggcgttggacgccaccaaccccaaaccgaacaccgtgctgctggccgtggccctcaacgacggcaagctcgtggtcgccgtctccggcaactcggaatcgtggctgtacaacaagaccacgtcggaccagctgctgaaaagcgcctacgggccggtcagcggcaggaaccccgactggtccggctcggcgatcgccatgatggattccatcgccacgatcaagacgaccacagcgcagcgcggcacggtgtggaaatgggtgggcatatccgtgatgtgcggcgtgctggtggttctgatcgtcatcggcgtcgtgacggtggttcgccgtcgtcgcgatacgaagggcaagcagccggatgccgagaaggacgcaggaaaatctacagagaaagccacgaagaaaggcacgggcaagtccgccaagaagcggcgctccaagggtgatgcagccgagtcggactccacggcggaggacggcggcgggccgcagtccgcttcaagtgaatccgacgggcagtccgctccgtccgtacccatgacgcgccgcgaacggagggaggcatcccggcgcggaaagcggttcggaacgtcgtcggccgccaccgcgcccaagccgggcaacaccgacgaagccgccgacgaaggctcccggaagcgtttcgacgcgtggctggcgtccattgtcccgcaagacacagatggtgttcaggaaacatccagaacatcgagtcaagctggtaaccatgagcaagccgattgaagcatccattgttgttgtcgacgacgaaccgtccatccgtgaactgctcgtcgcatccctgcatttcgccggattctatgtggccaccgccgcatcgggctccgaagccatcgaggtgatcgagaagacccagcccgacctgatcgtccttgacgtcatgctccctgacatcgacggattcaccgtgacccgccgcatccggcaggagggcattggcgcccccgtgctgttcctcaccgcccgcgacgacacacaggacaaggtgatgggattgaccgtcggaggcgacgactacgtgaccaagcccttcagcttggaggaggtcgtggcccgcatccgcgcgattctgcgtcgcacccgtgagcaggtggaggacgatccgatcatccgcgtcggcgaccttgagatcaacgaggattcgcacgatgtgtcccgcgccggtcacgcgatcgatctgagcccgaccgaatacaagctgctgcgctacctgatggacaacgagggccgtgtgctgtcgaaggcgcagatcctcgatcacgtctggcaatacgattggggcggtgacgcggcgatcgtcgagtcgtacatctcgtacctgcgcaagaaggtcgacggcatcatggtgaccgacgacaacggtgaacagcacaaggtcaccccgctgatcgagaccaagcgaggcatcggctacatgattcgcgagcccagagtctcggcgtgaggcgggcgcgatgaccgcacagacacctccgccgacgggtgacggaaccgccgcaggcccggccccggcaccgggaaccgtgccgaccggcacggccgggaccccgggaaccgcgcagatacctccgccgacagccgcccctgcgagccagaagcgtgcgacccataccaagggtgtgtgggcgacactgaaatcgatgttcgtcgggcgcctggacgccgttccgcttgccaccaagatcgtggcgtgcacggtcatcctgctgatcgtgggtacggccggtatatcactgacgttgcgccagctggtcggcaactacatgctggagaagacggacacgcagctgttccgtcaggcgcaactggtcctcaacaacatcgataccatgcgccagcagaataacgccgagaaatccagcagcagcctgctgtacagctacttcgtgcagatccgcgacagcgacgacaccatcttgcgcaacgccatcgtccccactctcaaggacggcgtcagttcgatgccgttgctgcctatgaacggcagccgcggaggcgtgcagctccagcagccgttcaccaccaacgccgtcgtgacgttgagtgggcggagcgtggaccattccacgctgtccaccgccgaatcgccgtggcgcgtcgtggcgctgccgtggaccgatgaggacggcaagcccggcggcgtatgctacatcggtctgtcgctgagcgaccagcttgacaccgtaaagacattgacccgttactgcatcatcgtcggcgtagccatcgtcatactcggcgccctgctggccacgctgatgacccagagaacactgtctccgttgaagcgcatcgagaagaccgccgcgaagatcgccgccggcgacctcacacaacgcgtgcccccggcgccggagaacacggaggtcggttcgctgtcggtctcgctcaacgccatgctcacccgaatagagcagagcttccacgagcaggaggagaccacggcgaagatgaaacgattcgtctccgatgccagccatgagcttcgcacgccgctcgcggcgatccacgggtatgcggagctatacaagatgcagcgtgacctgccgggtgcgctgggacgcgccgatgagtcgatctcgcatatcgaggattcgagcacccgcatgacggtactggtggaggacctgctgtcgttggcgcgcctcgacgaggggcgtggcatcgacatcacccagcaggtgccgctgaccacgctggtcacggacgcgaccgaagacctgcacgcgctcgatccgggccgtgagattcgccgcggcacgctgacattccagccgcgcaacggggatgagccggccgatctggagttcgtcgaaggcccgctgcccgatgtcacgctgaaaggcgacgggtcgaggctgcggcaggtggtcaccaacatcgtcggcaacatccaccgctacacgcccgccgactccccggtggagatatccgtcggcgtcatgcccgcgtcgatcagccccgaatcgttggcccgcatgtccgcgaatgacgcctcgatgcgctacttcatcgaagccgtggacgtaagccgctccatgcagatgggcatgaactacgcggtggtccgcttcagcgaccatggtccgggcgtgcccgagaactcccgctccaagattttcgagcggttctacaccgcggacccgtcccgggcgcgtctcaaaggcggcaccgggcttggcatggccatcgcgcagtcggtggtcaaggcgcacaagggcttcatctgcgcgaccgactcccagggcggcggcctcacgctcacggtggtgctgcccgtagcgccgctggagccgaagatcgccgtgggcgaaccccctcaggacgccaaggcggaacgcaaggccgaacgcaacaaagccaagcaggagagacagcaggcgcggcagcacaagagcgagtgattcgcgtccggtgcgctgccgcgtgccgtgcgttcatgcattgaggtaaactgatactttgatgtattcatgagcagatcgagaatctgccggtccgacgagtaacgaggtgtgccatgcccagtgggcgcgtacgttggttcgacgcgaaaaagggattcggattcattacgaacgacgagggcgaggacgtgttcctgcccgcagcggctctgccggatggcgtgaccaccctgcgcaaaggcgcccgcgtggagttctccgtgatcgacggccgcaaggggccacaggccatgggcgtgacgctggtcgcatccgtgccgtccctggtcaaggcgacccgcccgaagccggatgatatggccgccatcgtggaggaccttatcaagttgctggattccgcgggcaacgagctgcgtcgccatcggtatccctccgccgccgacagccggaagctcgccacactgctgcgtggcgtggctgacagcttcgacgtgcaggaatgaggggacaggggatagtacatgcctgaaacgaccatgcctgagacggttgtggacgaacccggtatcgcggattcgcccatcgcctccatcgacccgaaagacgctgcccgtgccatggccgtcgaggctgccgaggacgagaacggcgtcggagagttcgtcgaggccatcgacgccggtgacggcatcaccgattaccggttcgtctcgctgatgcgcggctacgagggatggcagtggtccgtgacgatgttccacgatgtcgaacgcgacacgtggacggtgaacgagtcaacgcttattcccatggaacaggcgctgcgccctccggaatggattccatggaaggaccgtctgctgccgaccgacctgtcggtgaccgactccatcggcaccgacccggatgatccgcggttggaggaaggtttccgggcgaccgccgaagccgagaccggtgacacgcgcgtttcggatgcacgggacgtggaagcggccggggccccgggcaaggtcgatgccgcggatgaggcatcggataccggagcatcggattctgaggcgcccgacagcgaacctgtggagtcccaggacgctcagcccaccacagctgcggaggatgtcgatgacgcggtgagcgcattcgatctgtcccgccgccatgtgctgtccccgctgggccgcgcccagaccgcgcagcgctggtatgagggccctcgcggccccaagtcgttgtccaccaagaccgcgtcgggcaatctgtgctccacctgcgggttcttcgtcgcgttgcagggcgatctgagcgaaatgttcggcgtctgcgcgaacaagtggagcccggacgacggcaaggtcgtctcgctcgaccacggatgcggcgaacattccgaaatcgagccgcccgagccgagccacatgtggattcaatccaagcccgcgttcgacgacctgcatatcgatgtcatcgcgcaggcgccgcgggacgagcgcggcgaagtggagctgatcgagaagctcggtgccgccggcctgccgttcgacgtgcccaagggcacgatcatcctcaaatcccagctgcctgaaacgcgctgacccgaatcgcccgcaacacgggcaacgtcacggcggccgaatggcggaataacgatggaacgataatcgcctgtgacaccacgcgaagcggtgtcacaggcgattcgtctatatccggggttgcgcatccgggccagcgcgcgatggcgctcagtgcacgatggtgaccgtgcactccgcgaagttcaggatctgcctcgacacggaaccgaggaaacgggcgtccaagccgctcaggccgcgggatccaacgaccagatggctggcgaaccgggatgccgtggtcaggcccttggccgccgcgatgtggaacgccttgcccgtcacctgaagcccgtcgggaatatcggcctgctcgatcatgcgacggacgatgtcctgcgcgtgatcctgaccggcgccgatcgaggcgatcgcgttctcatagccgggcacctcgcccagatccttcagctgccagcagaacatgacctgcagcggggcatgatgcagcgcggcgaaatcaatggcgaaccgcaacgcatgacgggacgtctcggaaccgtccacgccgacgaccaccggacgttcgcccttggccgcggccagctcatcgtcatcatggtgaatcggcataccgggggcgagcgaatgcgcgatatcatcctgcacgctcttgtcctcgttgccggcgatcctgaccaccgtcaccggcaccttggcggattcggcgagggaggacgacagcgaccccacgaaccatctggtcacacgacccagggatcggcggccgacgacgatctgttgggcatccgctccgatctgcagcagtccagtcgtgccggaggcgtgcacggaagtgagcttcaggttatccgggtcgaatgcgatgccggcgctcgcctcattcacccaatccagcagttgctcggtgatggccttgctcgccttctcccacgcgtcgggattgtccggctgagctcccatatcccacgaatgcgtccacgcatagaccgcgttgaccgccctgccgctcaaggacgcctccctgagcgcccactgcaaggccgtgaacgactcctcggagccgtccaccccaacgacgatgtcgccggctccgtccgacgtccgcggctcggactcgatgttcacatctggttgcgtcatgacatcctccttgttggcatgttatattcagcatatcgtttttcattgcgttatgagcgcaattatcgcgaggaaaggcataaacgtcatcgcgaatcggtagagtggtgtggactatcgagatggaaggacaagcatgttcgaacggtttaccgaccgtgcacggcgcgtgatcgtgttggcgcaggaagaggcgcgcactctccagcacaactacatcggcaccgaacacctgctgctcggcctgatccgcgaaggtgagggggtcgccgccaaggcgctcgcatccaagggagtaaccttggacgacacccgcaagcaggtcgaggagatgatcggcaaaggcaatgccgcccccaacgggcacattccctttactccgcacgccaagcaggtgttggagctgagtctgcgcgaggcgctgcagctcggtcacagctatatcggcaccgagcacatcctgctcggcctgatccgcgaaggcgagggcgtgggcacccaggtgctcatcaagatggatgtcgacctgggcgaactgcgttcggccactatcgacatgatccatggcaacagcggcggcgccaatgcctccggcaagggcgatctggccaacgccggcggcgtgcaggacaaacgcagccagaccggttcggccattctggaccagttcgggcgcaacctgaccgccgaagcggccgagggcaagctcgacccggtgatcgggcgcaccaacgagatcgaacgtgtcatggtcgtgctgtcgcgccgcacgaagaacaaccccgtgctgatcggcgagccgggcgtcggcaagaccgccgtcgtcgaaggcctcgcgcagaagatcaacgccggcgacgtgccggagacgctgaaggacaagcaggtctattcgctggatctgggctccatggtggccggctcgcgctaccgcggcgatttcgaggaacgcctcaagaaggtgctcaaggagatcaagacgcgcggcgacatcgtgctgttcatcgacgagattcacacgatcgtcggtgccggttcggcggacggcgccttgggcgcgtctgacatgctcaagcccatgctggctcgcggtgagctccagaccatcggcgccaccaccaccgacgagtaccgcaagtacatcgagaaggacgcggcgctggaacgtcgtttccagccgattcaggtgcatgagccgacaatcgcggagaccatcgagatcctcaagggcctgcgctcgcgctacgagaaccaccaccatgtgaccatcaccgacggcgcgctgcagtccgccgcggagctgtcgtcccgctacatccaggaccgcaacctgcccgacaaggccatcgacctgatcgacgaggccggcgcgcggctgcgcatcaagcgcctgaccgccccgcccgagctcaaggaacttgaccagaaggtcgcgaaggtcgccgccgagaaggacaaggctatcaaggaccaggacttcgagaaggccgccgagctgcgcgacaaccaggagaagctggaagcggagcgcaaggagaaggaatcctcttggcgcgagggcgagtccgatgtcgagatggtcgtgaacgaggatgtgatcgcccaggtgatctcctcgaccaccggcattccggtgttcaagctcacccaggccgagtcgaagaagctgctcggcatggagtccgagctgcacaagcgcatcatcggccaggacgaagcggtttccgcgctgtcccgttcgattcgccgcactcgtgtgggcctcaaggatccgaagcgtcctgcgggctcgttcatcttcgccggcccgaccggcgtcggcaagaccgagctggccaaggcgctggccgagttcctgttcgacgatgaggacgcgctgattcgcgtggacatgtcggagttctccgagaagtatgcggcatcgcgtctgttcggtgctcctccgggatacgtcggttacgaggagggtggcgagctcaccgagaaggtgcgccgcaagccgttctccgtcgtgctgttcgacgagatcgagaaggcccatccggacatcttcaacacgctgctgcaggtgctggacgacggtcacctgaccgatggtcagggacgcaaggtggacttcaagaacaccatcatcatcctgaccaccaacctgggtacgcgcgacatcgccaaggccgccaacaccggcttcaaccttggctcgaacgcggagtccagctaccagcgcatgaaggatcaggtcagctccgaactcaagcagcagttccgccccgagttcctgaaccgtcttgacgacatcatcgtgttccgtcagctcaccgagccgcaggtgcgtcagattgtcgacctcgacatcaagcagctcaacgaccgtctgttcgaccgtcacatgtcgctggagctcaccccggccgccaaggacctgctcgcgcagaagggcttcgacccgctgctcggtgctcgtccgctgcgccgcgtgatccagcgcgacatcgaggacgccatctcggagaagatcctgatgggcgaactcgaagacggtcagcgcgtggtggtcgactccgaaggcgagggcatcctcggcgagttcactttccgcggcgaacagttcgacgacgccaagcccgagaacgagccggctgcggagccggcaacggaggagtcagctgacaagtcggctgacaacgccgctcccgcctcgcaggaggcctgatcgggtaccggttgaccggccgactgaccacccccagtctcgctacactcgacagccccgccagcgggggcgtgaattggctcccgctggcggggccgtcgcgaagcgactgggggtggtctgcaatatcctcccactcatgccgtcctcaggacggcaaatcacccgcacccatactcccaccatgcgattccgtcctacagtggaaaccgacacaacgaagtgttggtcaggaagtatctggccgcgatcattactttggcctgtgctatgacatgcgataccaattgcacatgcagacggaacctctcccgaaaacgagttggtcaccgtcgtgttggtacaggacgctgagaggatggtcagcgccgacattcccgcacagtatgtgcaggagtataagaacaggctcaagaacgaagaattcaaggccgccgagattgccgaggcgaccggttccgagataagtctcatgaccacgacagctaacaacccgctgaagccaaccgtgacatatttccggaaaagcagctgcttcatgcaattcatatggccggtggtttgtcatacctgaatgtaacgaacggcctattcatgattgctgtcatcgtattcgccggtctgcttggcctgttgctcagtatgatgatgcgtcggcagcagacccgtgagcaggcgcatgagcgcatactggagcgggagcgtcaggaacatcacgctcagacgctcgattacgccgcgcaggtgcacgactcgggcggacgcggtatccgttgatcggttgcgtcgactatgtgacgctcttcgagaagagcttgccggcaagggattccatggagggttcgcgctgcacgacaatggactcatggaagacatcggccccgatcatatgacgctgcttggcgagccgctcaatgaaatcgcccataacatcatccggcactgcccggcaggttgcgaattcgattgcagcgtgatgcttcacgatgacgtcgcagaagtcacccagtacaattccgtgactcatccggccgataaaaagtgagacagcggtctccacacgtatgggacttggcctgtgtcgtgacagactgctccatatcggcggcatgctgcgcaccgaggtcgaggacggcacttggatgctgtatgcccgtgtgcctctaacgcatcaaacctgaccactgtcgtagcgtccgcggtgtcgtaatacaaaaaaagagcgccggggagaattccctgacgcccatgccaacgagacgatgacagccggtaatcggtgtgtcggccgaccgtcctgacgacggcggccggccgacacaccgggccggacagcgaatcggcctacttgatagcgttgagccactgctccttggtggccttctccgcctccagcttggccttcttcttcgggtcggactcggccgcgatcttctcgtcaagctcggcgagctgagcggtcagctgctcctcgaagctggacttgcgggcgtcggcctccggatcggtcttcttccacgcggcgtcctcgacggccttgatctgcttgtcgacggcgtcgagacggccttcgatgcggcgcatgtcgtcgcgcggcacatagccgatctgatcccactcgtcttggatgactcccagcgcctgacgcgccttcttcgcggcggcctcgtcagcgacgggcaccagggcctcggccttcttcagcagctcctccttcttggcgaggttctctttctcggaggtgctgatctggtcacggtcggcctgacgcgcgttgaagaactcgtcggctgccttgcggaactgcgcccacagcgcgtcgtcatcgctgcggccgacgcggccggcccgcttccaacggtccatcaactcgttgaaccggcgcgaggtctcaccccatgcggtcgagtccttcagctggttcgcctcggcgatgatcgcctctttctcggccttggcatgggcgcgctcgacgtcgcgggcctgcgaccacttgcggcgggcctggttgaacgtggtgcgtgcggcggagaaacgcttccacagcgcgtcggcctgcggcttgtcgatgtgcacggacgtgcgctgatgctgctgccactggtcgaacagggaacggaacttgtcggcggtggaacgccagttgatctcgtcatccagcgaggatgcgagggcctcggccttctcgacgatcttggtgcgttcttcgatggccttggcgatcgccgccttgcgggccttggtgagctcggccttcttcgcggcgccggcctccttcagctgctcgaactgctgcttcagcgcggccatgtcgccgaccgccgcgggcttgtcggtctcctgctcaagggacttcagcgtctcgtcgatctcgtgcgacttcaccgtgtcggagtgcaggcggctcgccagcagatccaacttggccttgaggtcaaggtaacgacgggcgtacagcgacagcgcctcctccttggagacgtcggggaactgcccgacctcacgctcggagtcgccctccctgacgtacacggtaccgttgtcgtcgacgcggccgaacgcttcggccgccttcacctcggtgtccgaatagccggatgccgaagcggcgggggcggggcgcttgaccgctttcttggcgaatgcggccggcgaaggggcgtggggtttcggcgcggatgcaggggtcggtgccggtgtgggcgtcgttgcctgctcggtgggttcggtggtgttgtcggatatggtggcagtctcgtcggccatggccagctccttataagcttgaaggtagtcgttggctggggaaaaatccgaatggatttttccgcaacctcccctattatagggaatcgtggctaaaggcgcatcaatatcaggatttccagagtggctcccctctgaacgtgttgtggagcagcgtgtcatcgacacgctccgtagggttttcgagctcaacggtttcatcggcatcgagacacgcgcggtggaacagggctccagtctgctcaaaaaaggcgagaccagcaaggagatttacctgctgtcccgtctgcaggaggtcgggcacgaatccgacacgccggtcaatgaccggttgggtctgcacttcgatctgaccgtgccgttgagccggtatgtggtcgagcattccggcgacctcgcgttcccgttcaagcgttggcagattcagaaggtgtggcgtggcgaacgtccgcaggaaggacgtttccgcgagttcgtccaggccgatatcgacgtgatcggcaacggcgacctgcccgaccattacgaggtcgagctgccgctggtcatggtgtcggctcttgaggagctgcgcgcattcggcctgcccaaggcgaccgtgcacgcgaacaaccgcaagctgtccgaaggcttctaccgcggacttggcctgaccgacatcgagggagtgcttcgcgagatcgacaagctcgacaagatcggcgcggacgaagtggcgaagctgctcgtcgacacgtgcggcgccgatgaagcgcaggcccgcgcctgcctggaactggccgaactcaccgccgccgacggcaaggggctcgccgacaagttcgacgcgctgtgcgccgcgcacggcatcgcggccgattccgacgcgtacgcgctggcccggcagggactggacacgctcgcgatgatcgtcgacgaagccgccctcatccgcccgggcgcggtgatcgccgacctgaagatcgcccgtggactcgactactacaccggttccgtatacgagaccttcctcgacggggcggcgtcgcttggctcgatctgctccggcggccgttacgacaacctcgcctcgcagggcaaccgcaagtacccgggcgtcggcctgtccatcggcctgagccgtctcgtgtcgtacatgctgcactccgccggagcgcacgccagccgcgtctgcccggcatccgtgctcgtcgccgtgtggaacgagcaggatcgctccgccgcgaacctcatcgcgaacacgctgcgctcccgcggcatcgccgcggacgtcgcgcccaccgcggccaaactcggcaagcagatcaaatatgccgacaagctcggcatcccgtatgtgtggttcccggccggcgcgacggacggcgacgacacggcatccgacgaggtcaagaacatcgtcaccggcgatcagcagccggccgatcccaagtcgtggcaaccggatactgtgtatgcccggcaaaccgttgtaatcgactgattttcgtcagcgcccgtcctctgccggggacgggcgcgcgttgcagggaaaccattgcatagattgcataagaaagaggaagcatgagccagacggcttacagaacacatcatgccaccgaggtgaccgaagcactcgtcggtcagaaggtgacgctcgcaggttgggtcgatcgtcgccgcgatcatggcggcgtggcgttcatcgatttgcgcgacaacaccggcctggtgcagatcgtcatctacgacgaggagatggcgcgcccgctgcgctccgagttcgtcatccaggtcaccggcgaggttcgtctgcgcccggacggcaacgagaacacgcatctggccaccggcaagatcgaagtcgtcgtcgagaccatcgatgtgctcgccaagtccgatgcgctgccgttccaggtgtccaccgcgctcgaaaacgagtccgagaacaagctgcccggcgaagacgtgcgactgaagtaccgttacctcgaccttcgccgtccgtccatgcagcacaacctcaagctgcgctccgacatggccaaggccgcccgccacgcgctggaggagatggacttcaccgaggtcgagaccccgaccttcatcaagtccaccccggaaggtgcccgcgacttcgtcgtgcccgcccgtctggtgcctggctcctggtacgcgctgccgcagtccccgcagctcttgaagcagctgctcatggtctccggcgtcgagcgctactaccagctcgcccgctgctaccgtgacgaagacttccgcgccgaccgccagcccgagttcacccagctcgacatggagatggcgttcgtcgaccaggaggacgtgatggccatggccgagaaggtcatcgccgccatctggaagtccgccggctacgacgtgcagctgccgattcagcgcatcacctggcaggatgccatggacaagtacggctccgacaagccggacctgcgtttcggcaacccgctcgtcgagctcaccgaatacttcaaggacacgccgttccgcgtgttccaggccgactacgtcggcgccgtcgtcttcaagggcggtgccgccaccccgcgtcgtcagttcgacgcatggcaggagtgggccaagcagcgcggcgccaagggcctcgcctacgtgtccttcaccgaggacggcgatctcaagggacccgtcgccaagaacctgtccgactccgagcgcgagggcctgatggccgccgtcggtgccgagtccggcgacgccgtgttcttcgccgccggctcccgcgaatcctcccagctgctgctgggtgccgtgcgcgtggagctcgcccgtcgcgagggcctgctcgatccgaagaagttcgccttcacctgggtcgtggacttcccgctgttcaagcccaccgacgacccggatgacgatgatgtggccgtcggccactccaagtggacctccatgcaccacccgttcaccatgccgagcaaggactggatcgacaagttcgatcaggatcccgagcacgccatgtctgactcctacgacatcgtctgcaacggcgaggagatgggcggcggttccgtgcgtatccaccgcgacgacattcaggaccgcgtcctcaacgtcctcggcatcgctcccgaagaggccaaggagaagttcggcttcctcctcgacgccttcaagttcggcgccccgcctcacgcgggcatcgccctgggctgggaccgcaccgtgtccatcctcgccggtgccgacaccattcgcgacgtcatcgccttcccgaaggccggtggcggtcgtgacccgctgaccggcgccccggctccgatcagtgacgagcagcgtgccgagaccggcgtcgactacgacccggatgccgaagactgagtaacatctcgctgtcttctttgacgggagggcccagaccatgcaggtcggggccctctttgcatatccgtctgcgcagtgcacaggccgtttttttcgcagttgtccgcgccctgctacccgtgaggattgccgaactgctgttttgcgttcctaagtgcgcgccgaaacgacaagtgcgcgcacatagcgacgcaaatggcccggtttgcgttcttaagtgcgcgcggtcgtcgtttcggcgcgcacttaggaacgcaatgacggccaaagcacatcagatgcatgccatatcaaccatttgatgatgggcgatgaggtcgggcagggcacaatgggatcgtgatcaccattggaatcgtggataacgaccggttcgcattgcccatgctggatatgccgctgaccgacattcccggtcccgagatctgccggcgtgttcgtgctgcatcagccgacatcgtggtacttggcatcacatcgtattcgttggatcattaccgtcagctggcgatcgatgcgggcgcccaagggttgattgccaaaagcgtgacgccgaagaaggaactcgccgaagccatgcggaatgtcctggtacggccgttcccgggtttcccgaccacggaacaggcacatgggtcgatagtatcggcatcggcgcgacggtcccggacactgtctaagcgggagcgtgaggtgttgggtctgtatgccgacaactattcgacggcggagattgcggagcgcctgggaatagcggattcgacggtgtccgtggtggtgcggcacgcgaaggtcaagctcgacgtcgccactcggtcgaaggccgtgcgcgtgtttcgtgcattgtactgagtcgaatacggcttgaacatcgtgcgtctgtttacggtgaccacccccagccgccggtaccgatcgaagccgctgccatgtcgatccggcatgttgatgacgtcatgcgtgtcatgcagcgcccgcatgacgatggagcgcaacgattgtgcttccgcttcctccagcagccctgcgtcgaggtcatgatcgatacgcatgaccgcgtaggcgagatcgttggagattcggtcgtgcacacgcacaagatccgcaaggcgccgcccgaattcgccgcggctttcgtcaccgcggacacgcacgccgacctcaactgcgtggtcaagcacacgctggaggtgtccaaggtcagtttcgtgccgattgacgcggccgtcgaggcgaccggcatggagtcgggcggcatgtcgccgatcggactgcccgatgactggtcgctgctcgtcgaccagcatgtgctgtcgattcccaagctgtatctcggctccggcatccgcccgtccaaactggtggtcgacggctcgatcttcgccgatattcccggcgtccgattcgtccccggtctgggcaagccccggcagtaagacgccgtgcggccgcgggcgagtcgcatattggacgagaatgtgagcttcttgtgccttcaatagtttatactgctcaatatgtcagaaaaacaagaagcaatactccccgtggtgccgctggtaccgggcaatgaacccacagaacgacctctcgtcgaactgactcacgtggaaaagtacttcggcgacctccacgtattgaaagacatcaacctgaccgtcaacaaaggcgaagtgctcgtcgtcgtggggccgtccggctccggcaagtcgacgatgtgccgcaccatcaaccgcctggagaccatcgagtcgggcgacatccgcatcgacggcaaggcgctgccccaggagggcagacagctcgcgcagctgcgcgccgaagtcggcatggtgttccagtcgttcaacctgttcgccaacaagacgatccttgaaaacgttaccctcgcgcccatcaaggtgcgccacatggacaagaaggaagccgagcgtctcgccatggatctgctgacccgtgtcggcgtcgactcgcaggcgtccaagatgccctcccagctgtccggcggccagcagcagcgcgtggccatcgcccgcgcgctcgccatgcgcccgaaggtcatgctgttcgacgagccgacctccgcgctcgaccccgaaatggtcaacgaggtgctggacgtgatggtcgagctcgcgcgagaaggcatgacgatgatctgcgtcacccacgagatgggcttcgcgcgcaaggcggccgaccgcatcgtgttcatggccgacgggcagatccttgaggagaacacgcccgacgagttcttcggccatccgaagaccgaacgcgccaaggacttcctgtcgaagatcctcacgcactgattggtcgtgacgcatatgacggtattcaacactcgcatcaggcgcatcgcccgccgcgcgctcgcggcgctcgccgccgtggcatgcacgatgtcgctggccgcgtgcggcgccgacgaaagcggcaagatacgcatcggcatcaagttcgaccagcccggcctcggcttcaagaaatccggaacatacgtcggcttcgacgtggacgtggccaagtacgtcgccaagaagctcggctattccgaaaatgagatcgtctggaaggaagccccctccaagcagcgtgaggccatgctgcagaacggcgacgtcgacatgatcctcgccacctactcgatcaccgacgagcgcaagaacgcggtctccttcgccggcccgtacttcgtggccgggcaggacctgcttgtgcgcaaggacgaccattccatcaacggccccgaagacctcaacggcaagcgcctgtgctcggtcaccggttccacttcggccgccacagtcaagaagaagttcgcctccgaagtgcagctcatggagcagcccggctatgcggaatgcgccacggcgctgttctccggcatcgtggacgcggtcaccaccgacgacatcatcctcgccggcctcgcctccgcctcgcgtggcaagctgcgcgtcgtcggcaagccgttcacgcaggaatactacggcgtgggcatcaagaagggcgacacggcgctcgccaagaagatcaacgccgccatcgccgagatgatcaaggacggttcctgggagcgcgccatcgccgacaacaccgagggcacgtcgtacacgccgaacgcggagtacaacccgccgaaaccgaccgagggggagaagtagcatggacggattcatccaactgttcagcgagtacgacgttcccgccgcgttcctggtcaacatcgaactgacgctgtggtcggcgctgttctcgctgattctcggcgtggtgctggtcatgatgcgcatctcgccgatatcctcgctgcgcaccgtcgccggagcctacgtggaactgttcaagaacctgccgctgaccatcatcatggtgttcatggtgctgggcgcctacgcgcagctcaagctcacgttctccgacacgttcgtcacgaacttcttctggctggcggtgacgggactgagtctgtacaccgcggcgttcgtgtgcgagtcgctgcgttcaggcatcaacaccgtgccgatcggccaggccgaggcggctcgtgcgctcggattgggcttcatgcagtcggccacgcagatcatcctgccgcaggcgttccgcggctcggtcgcgcctctcggcaatacgctgatcgcgttgctgaagaactccacggtggccgcggccgcgtcggtggccacggagacgtcgtcgctgatgagcacgatgatcgaattccacccggacgtgatcgtgcagatcttcctgatcttcgcgttcggctatgtgattctcatcatcccgatcggcatgctgaccacgtacctgtccaacaagctcgccgtgcggaggtgacgacatggctgatacttccaattccgtattgttcgaccagcccggtcccaagggacgtcgcaccatccgcatcgtcaactgggtcgccgcgctgatctttgtcggcgtgctggtgctgatcctgatgcgcctgcacaacccgccggacggcgagaaccagctgagctgggagctgtggaagcccgcgctggagcgtgaggcatggaccgatttctatcttcccggcctgtggatgacggtcaaggcgtccatcgtcgccgttgtcggctccgtggtgttcggcctggtgttcggcgtcggccgactgctgccgaacgtggtgctgcgggcgatctcgtcggtcgtcgtggagttctgccgcgcggtgccggtactgctgctgatgatcttcttctggcgctggttcgcgttcgcgggactgtccagcccgtcctactgggcggtggtgctggccctggtgctgtataacggctccgtggtcgccgagctggtgcgttccggcgtcggcaacctaccgaacgggcagcgtgaggcgtcgctcgcactgggactgaccgagacgcagtcgctgatgcagatcgaggtgccgcaggccgtctacgcgatgttgccggccgccgtcacgcagctggtcgtggtgctcaaggataccgcgctcggatcgatcatcatgtacaccgatctgctgcaggagtcgcgccgtctcggctcgatgtacttcaacatcctgcagacgctggtcgtggccgcggtcgtgtacttcatcgtctgctggctgctgtcgcgtctggccgaatggctgccgtcgcgcatgcagcagcgcaccgcggcgccggccgaaccggaaccagttccgccgatcgcgatcatggatccgtccaacgtcaaccagatcgccgtcgccaaggaggtcgaggagcgccccctgcgcggcacgccgctcacataccacgtgcaccatcgcggcagcaacgtctcgatccacaactggcagcgcacgcgctacgagcagggcttcgacgaggcccatcccgatccgcagggcggagatgagggcgatgccgagcagaagaacgctgaagacgacgcgtaatgacccggtagattacggtccgcgcaggaatacgcggacagcgtcccgcagcctgacccgataacggccgggccggcactccccgacaggggatgcgccggtccggccgttcgatattccgccgcggaaatgcttcacaaggcggcgcatgggacgtacaatcggggcatggccaaaggcgacggaaaatcggacaagacagataagccggacaagtcgggcaaaggagcgaagtccgagaagacggacaaacgcatcgacaaggtactgcggctcgccacgaaccgcatcgaaaccatcgaatcgagcacgacggtggctgaacgactcgcgaacgccgccaaatccagtgagctgctcagcgctgtatggtcgctgccacccgcgcagcgtctcatgttccatcacggcgtgcatatcgacgatgtcgccggagactccacacccggcttcccaggcggcagggatgacgctgaacggttcatcacgctcagctcatcggagatcgcccgatatcaacggctgctgtatgcgaacggcgtcaagggctcgcgccgccggctgctcatcgtgctgcagggcatggacgcctccggcaagggcggcatcgtgcgccacgtgttccggcagggcgacccgatgggcatccactatcacggtttcggcaagccgaccgacgaggaggcgcggcacggcttcctgtggcgggtggaacgcgagctgccaaagaacgggtggatcgcggtgttcgaccgctcgcattacgaggacatcgtcatgccgcatgtgtacggcacgtatcccgaggccgaatggtgcggccggtacgatctggtcaatgagttcgagcgttcgctggcggccgacggctgcgcgattctcaagatcttcctcgtcgtgagccaggaggagcagaagaggcattttctcgggcgtctcaacgacccgaccaaatactggaagttcgacatgtccgacctggatgcgcgcgaacgctgggacgactatatgggtgcgtggcaggaggtgttcgagaagaccagcacgcagaccgcgccgtggtatctggtgcccgctgacaaccgctggtactcgagggccgtggtctccgagctgctgcgcaccacattgaagaacatgaacatgacatggccgggactcgacccggacgtcgatccggacgaggttcggcggctgctggggtgaacttgcgcccgccggtcgattccgcaagctgcaccggcgtgtagactgggaaccactatggcagatacagaacactatggttcgctgggggcgctggcgcccgcgtgggacgagggcgagcgcaacatcgacacggacgagatctacgagcggttcttcggctgggtggccgacgtcaagggcgtcgagccgtggcctcatcaggaagaggccatcatggacctgctggcaggcgaccatgtgatcctcaacacgccgaccggctccggaaagtcgctggtggcgcttggcatgcacttcgccgcgctgtgcaccgggcggcgctcctattacaccgcgccgatcaaggcgctggtctcggagaagttcttcgatctggtcgaggtgttcggccgcgacaacgtcggcatgatcactggagacacgcatatcaacgccgatgcgccgatcatctgctgcacggccgagatcctcgccaaccaggcgctgcgcgaggggcgtcgcgcggacgtcggctgcgtggccatggacgagttccactattacggcgactcggagcgcggctgggcgtggcaggtgccgctgctgacgctgccggacacgcagttcctgctgatgagcgccacactcggcaacgtcgacgcgatcgccgacaagctggaggacatgaccgacactgacgtggacgtgatcgccgacgcgccgcgcccggtgccgctcacttacgagtacacgctcgatccgctggagaagaccgtcgaacttgcgttccgcaagggcgagacgccgatctacgtcgtgcatttctcgcaggatgcggcgctcgacaccgcgcagtcgctcgcctcgaccggcgtgtccagcaaggagcagcgacaggccatcgccgaggccatcaagggcgtgaagttcacgaccgcgttcggcaagatactgcaacggctgttgcgtaccggcgtcggcatccaccatgccggcatgctgccgcgatatcgtcgtctcgtcgagcagcttgcgcagcaggggctgttgccggtcatctgcggcaccgatacgctgggagtcggcatcaacgtgccgatccattcggtcgtgctgaccgcgctgacgaagttcgacggcaccaagatgcgtcgcctgcgcgcccgcgagttccatcagatcgccggtcgcgccggccgcatgggcttcgacacggagggactggtcgtcgccgaggcgcccgaatacgagatcgaaaacgccaaggccgtcgccaaggccgggaacgatccgaagaaactcaagaaagtcaagcgcaagaaggcgccggaagggttcgtcacgtggaaccagagcacgttcgacaagttgattgacgccgcgccggaaacactcgtcccgcacatgaagatcacccattcgatggtgctcaacgaggtcacgcagggcggtgacgcgcgccggcgcgtcgacgagctgatcgacgactccgcgcagacgccggaccagaaggagcatctgcatgaacgtgccgacgagatattccagaccctgttcgacacgaaggtgatcgagaccgaagagcgcgacgacggtgggctcgactacttcctcgacgtggacatgcccgacgatttcgcgctcgaccagccgcttagcccgttcctgctcgccgcgctggaactgctcgaccctgaatccgacatgtacgcgcttgacgtgatttccatggtcgaggccacactcgaagaccccaagcaggtgctgcgcgcgcaggagcggcaggcgcgcgacgccgcgatgatccggatgaaggaagacgggctcgaatacgacgagcgcatggacaggctgcaggagatcacctatcccaagccgctggaggacatgcttgacgcggcgttcgatcagtaccggcacgacgtgccgtgggcgaacgactactggctgagccccaaatccgtggtacgcgacatggtcgagaccgcctccgacttcaccggatacatctcgcggtacaacatcgcccgctcggagggcacgctgttgcgctacctgtccgacgcctaccgggcgctcgcccgcaccgtaccggacgacaagctcgacgatcagctgcgcgacgtgatctcatggctgcgcgtggtcgtgcgttctatcgactccagtctggtggacgaatgggagaacgccggcgcgtccgatgatgcctcgcaggcggccgccagtctggccgcgccgggcgcgaaggccgcggtggtggaggaccggcgcgggctcaccgtgctgatccgcaacgcgctgttccaccgcgtgcagctcatggaccttgacaagcccgaggcgctcggcgctctcgacaaggagtggggctacggcgtgcatgagtgggaggacgcgctcgacgacttctacgacgaacacgagtacgtgaacaccgacgccaaggcgcgttcggccgagctgttcatgctcgacgagaagcacgagaacgatgagcacagctggcacgttcgccagatcatcgacgactccgacggcgaccacgactgggccatcagcggcaccatcgacctggacgcgacgcaatccagcggcgaagtcgtcttcttcgactacgccgtcaccaacgactgacgccgccggccctcgccagcgggggctggcgcgaagcgactgggggtggtccgtccggtatcgaacctatgttcgatgctgtgttgtagagtgtaggcatgactgagaatgatctgttcggggcggcggatgtgcccgacgatatgacgcgaccgttggccgtgcgcatgcggcctcggacggtcgacgaggtgttggggcagtcccatgtgttgggggagggctccccattgcggcgtctggcgaatccctcgtccaaggggtcgctgaccgcgccgagctccatcatcatgttcggacctcccggcgtgggcaagaccacgctggcgaccatcgtcgcccgtcagtcggggcgcgcgttcgaggagctgtcggcggtgacatcgggggtgaaggacgtgcgtgacgtgctcgcccgcgcgcggcgcagactcgtcggcgacggcacggagaccgtcctgttcatcgacgaggtgcatcgtttctccaaatcgcagcaggacgcgttgctgcccgccgtcgagaaccgtgacgtcaccttcatcggcgcgaccaccgagaatccgagcttctccgtcatcaaaccattgctgtcacgttccgtcgtcgtcaaactcgaatcgctggaaccgtccgatctcgccacgctcatcgcacgcgcggtggaagacaagcgcggattgaacggcgaagtcaaaatcgacgatgcggcggtcaacgagatcgtccgcatggccggcggtgacgcccgcaagacgctgacgatcctcgaagccgctgcaggtgccgtcaccggagacaaggcccgcaaaaaaggcgcgcggcgtccgaccatcacgccggatgtggtctcgcaggtcatggacgccgccaccgtgcgctacgacaaggacggcgacgaccattacgacgtcatctccgcattcatcaaatcgatgcgcggctccgacccggatgccgcgatacactacctcgcacgcatgctgcgagcgggcgaggatccgcggttcatcgcccgtcgcatcatgatcgccgccagcgaggaggtcggcatggccgcgccgcagatactgcaggtcaccgtcgccgccgcacaggccgtcgcgatgatcggcatgcccgaagcgcgcatcatcctcgccgaggcgaccatcgccgtcgccaccgcacccaaatcgaacgccagctacaacgccatcaaccaggcgctcgccgacgtggacgccgggctcatcggccaggtgccgctatacctgcgcaacgcgccgaccgcgttgatgaaaagctggggcaaccatgacggctatcggtacgcgcacgactggccgggtgccgtcgcgccgcaggaatacctgcccgaggagctgcgcggccgcgagtactatcatcccaacgaccgcggatacgagcacgaggtcagccagcgcttggacaaagtccgctccatcctgcacagtgaaaccgcgccggacggctataccgagtccaaagagcagaacggataaatcgccccgcccgacggggttgccgagcgatagcgaggctgggagtggttcatcgcaactgccactccgcccctcgtccggcaatccgttacactgtaatgtggcctgacgcagtgtgggtatcgtaagggcagtccggaaacaactggcgtcggtctgaatggatttcatcacatgacctcaacctcgcaggagcgcatccccaagcgtctgatcggcgccatcgtcgccgtgggctcgctggcattcatcggcatcctcaccgaaacggtgatgaccgtgctgttcccggaactcatgaccgaattcggcgtgaacaccgccaccgtgcaatggatcaccaccgtgtatctgctggtggtcgcggccacgatgccgctgtcgtcgttcctgaaccgccgtttccggctgaagtccctgttcatcgcagctgtggtccttgccttgaccggttcggcgatcatgatcgtcggccacaccttcccggtcatcctgctcgcccgcgtgatccaaggcatcggctcgggcgtggcgacgccgctgatgatgaacatcatcctcgaacagtcgccccgcagcaaggtcggccgcctcatgggcgtaggttcgctggtgatcacggtcgccccggccatcggccccaccgtcggcggcgcagtgtcgagtgttttgccgtggcgtgccatcttcgtcatcgccattccgatcgtgctgttggtctccctgccgctcggactgcactgcatcgagcagaaacgccccaccgaggacgcgcggctcaacccagtgcagttcgtggcgatagtgctcgccctgagcggcatgatcttggcgctcaaccagatgggcgtcgcggtcagcgctgcggtcaacggctcttcggcgacacgtcccgtcatcatcaccgtcgtgagcctggtcgtcggtgtgggctccctggtgttcttcggctggtcatccagccgctcgttctcgccgctgattcgtctggggtggctacgagaccgtgtcgtccagcttcatctactcgcgtatctgattctgccgatcgtcggcatcggattcggatacgtcatcaccaatctggcccagatgtcgcttggcaccagcgcgttccacgccggcgtcctcgtgctgccgggcgctctggtcggtgcgttcttcgcgcccgtcggaggcatgctgtacgacaaattcggcccgacgaagccgattctttcggcgatttcggtggccacgttcggaccgatcctgctgctggcattctccatgcggttgacgcctgcgctgctcgccggcttctacttcattttcgggctgtgctatgcgctgggattctccaacatcatgaccagtgcgctgagcggcatcgaccacgcgttcatgccggatggcaatgccgtgttcaataccgcattgcagttcggcggtgccgtcggcaccgcactgttctcgatgattctcggcgtggctcaggcgggcgccggctcggccgaaaaggggagtgccgcgttccgtcacgccacggccgtgggcggcacgtggatgttcgcgacgatgacggtgatctgcctgatcgcgatctgctcgcttgcctgcgcgttccgtatccgtgcgtcgagaacggctgccgagcgctgactcccgctccgggggatggttcaggtcagagccatcccaccgccagcagcgcgacgacgtaggcgacgcacgcggctgcgaccattagatcgcgtcggcgcgcgcgcatcactctccaatgggtgcggtggatgccttcctcgtagcagcgcgcgtcaagcgccagactgagattatccgcgtgacgcagcgccgccacaaggatcggcacgatgatggcgaacagcgctttgacacgagtggccggcgaaccggtctcgatcgtgccgccgcgggccgattgcgcgtcgatgatcgccttggtctcgtcgctgagcgtcggcaggaaccgcagcgcaagactcatcaccagagccatttcctgcgtgtgccagccgatctttctgaacggcaacagcagggagccgaacgcatccgtcatcgcggtgggggtcgtcgtcgcaaggaacacggcacccaggatgatcaccagcgcgagacggcacgaatacagcaccgcgaccatgagcccgccggtggtgatcggcagcgggccgatatgcgcaagcgtctcgccggagcgggcgaagaacatgttcaccaggcccatcaccgcgaatacgatcaggaacacgcgcacggaagacagcaaacgcagcggatgcagccgggcggccgccacgacgcatgcggtcaggacggcgcccatcgccagctgcgccggcctggtgatgacgaatgcggtgaacatcaacgtcaggaacgtcaccatcttcgcgcgcggatccagggacgctacgaatgacggacggttcctggattcgtcttcaatggactcgatgccggctttgccggcgttcgtggaagactcggtggcgtcgccgacgctggtgtcttcgtcgtctccggtgccgcaaccatcgccttcgccgtcgccattatgcgatcccatggtgatgatgcggtccgcgcagtgctcggcctcgtcgatggaatgcgtgatgatgagcaccgccacgccctgacttttcagggaacccagcagcgcgtggatgcgggagaccgccgattcgtccagactggcggtcggctcgtccatgatgagcacacgagggcggcatgcgatgacgcccgcgatggcgacgagccgctgctgcccgcccgacaggttgaacggagaacggtcggcgagatgctcgatatgcagcatccgcagcgcctcctctacgcgggtggccacctccaactcgctcagatgctggttgcgtgggccgtacgccacatcctcggcgacggtgtcagcgaacagctgacgctccggatgctgcatgacatagccgacgttgcgccgcagggccgcgcgttcttttcgggtgagtgcgcgaggccgtttcccgtgtttcgacgacgcgaccggcaatccggccacggtgatcgatccggcggacgggcggtccaaggcgcacagcagacgtgcgagtgtggtcttgccggcgccgttggcacccatcagcgccacgatttcgccttcggcgacgcgcagagaaagattctcgaaaaccggggcgtcgccatcgtcataacgatatgacaggccggatactgcgatggcgtcggatgctgagcctgtaggtggaatgggtgatgcgtccgacttggtagacgccggttttacgggttgtccggatttcgctggttgcgctggcgacgcggccgcggtggaacctccgggctcctcagctgccgactccgtggagcccgcagcgtcagttgcgtcagcgtggctccgcgcaatcacttgcttcgccgcaatcgcgtccctgtcggcttcgacctgcgtgagcagcccgccgtctatgcgaagtacgcggtcggcgtgcatggtctcgtcatgatgatgcgtgaccagcacgatcgtcgtgccacgccgttgcagcatgtcgaggatgcgcatcacctcgacatgcgcgtcgggatccagcatcgcggtcggttcgtcgagcaccagcatgcgcgggttcatcgccagcattccggcgatggcgatacgctgctgctggccgccgctcatgcgcgtcggatccgcgtggcggaaccccgccatatccaccgattgcagggattcgtcgatgcgcccgccgatgtcgtcccgagccacgccgaggttttccgggccgaatgccacatcatcctcgacgatggtggtgacgatctgatcctccggattctggaacaccgtgccgatgccatgccgggcatcgcggtattcgctcggattcgctgaagcggtctcgccgtcgaagacatgatggcccagcagcgtcacatcgccgccgtccggggctgcgagaccggcgatcagacgcgccagagtggatttgccggagccgttggggcccaccagacacagccgctccccgctgcggatggtcaggtcgatgccgtcaagcacccatgtgacgccgttgtcatagctgaatcgcacatgctcaagtcgtgcggcgggaaccatgccgttcatatcatccattcacaaaacatcgtggtcaatccatatcatagaggccattgtcaccgctgacggatgcagcccgccagagaggtcatcacccggactgtcggaaataagcctcgtgcgatgacccttttggcgggctgccctaggcggcgacttcgcgccgcgtcatgtcagcgattcagcaggttcgaaatcggcttgtacaccaggaacgtgaccacgccgtgaatcacgaacttgatcaggttgaacggcagcagtgcgggaacgatgatggccgccacctcggagaccggccagccggtgtagatcggcgtgatgaccagattgccggcgatggccgcgaccaaggccagcagggcaccgacgaccaaaccgatgacagcgcccttgcgcgtgtgcacgtggcgatagatgagcgccgccggcaccgacagcgtcaaggccaccagcacggccatcagcgtgccccacgggtccatgaacacgtgcggtacgaagccgagcacactgacgatcgcggctgcggccgggccgtacgcgaagccggcgatcaggcacacgatgccggacgggtcgtatttgaggaacgagaacgccgggttcggcaggatcgggaacgagatgaagctggtcgccatcgccagcgccacgaacagcgcgtacatggcgatgcggcgggtcgaccagcggccggaatcggcgacgccggtcgaatgcgccaaatccgggcgcgtcggcttggccgcgttcgacgaatcggctgaattgggttgcgaagatacactcatggtgagctccgtttcttccatccggactttgaccgttggctccggattcccaccggatcagccgcttgcgcgggtcgcgggctgccgcggccgccgttatgaatcccggctccgcaggtcaccgccagtaaggaattgcaccttccctgaaacttgcttgaccatgtatacgccggggtgtggatgattgacgtaacgttgtccacatagcgaacatgaggcatccatgcgcgtaggtggccccatccactacgttgtgaccggttttcgcgctgtataccggcgcaattgcccatttcgacacgatttcgttatacaatttcgcgtacagccactatgacgtgcgtgtcgcacaccgtccaacaggaggtcatgatgattgataccgctcaggcgtttggcgtggatatcggcggatccggtatcaaggccgctccggtcgacctgaacaagggggagttcgccgagcccagactgaagatcctcaccccgtccgagtccaccccgcaggcgatcggatcggtgctgcgcaagcagctcgaacatttcgaggttccggagacggttccggtcggcatctctttccctgctccggtcaagcccggccagaagctgaattggatcgccaacctcgaccagtcgtgggtaggcgtcgacatcaccgaggcgctgtccgaggagtgcggccgtccggtcacggtcgtcaatgacgccgatgccgccggcttggcggaacagcagttcggcgcggccaagggtcaggagggtctggtcgtcgtgaccacgctcggtaccggcatcggcacggcgctgatctatgacggcgtgctcatcccgaacaccgagctcggccacatcgagctggagggcggcaagggcgacgccgagcgctacgcatcctccgcggtgcgagagcgcaaggagctcagctacaagaagtgggccaagcgtctgaccaagtactacagcctgatcgaaaagtacttcagcccctcgctgatcgtcatcggcggtggcgtgagccgcaagagcgacaacttcgtgccgttcatcgacatcgatacgccgatcgtccccgcgaagctgcgcaacgaggccggcatcatcggtgccgcctactacgccagcaccaagtagcgcagagggcacaggcacatacattcgcacgccataccttggccgaccatcgtcccggcaatgcaggacgcatggtcgcggtagggtagtggcgtgcgtttttcttcccgagtagatctgagcgagcccaatcccatagccgcagccgagacacattgccggtgcgaaggcatgcccctgggcaagctcaacgattccaatcccacacgtcacggacttgcaccggcactggtgccgggcacgtacaccgccgacccgagaggcccgcggcccgcacgggaggcgctggcctccttcctgaccgagcttcaccggggcgccgaaggtgccggcaccgcgccggcggcggatccggatcgcctctatctgctgagttccacgtcacaggcgtactcgtggctcatgaagctgctgtgtgacgcgggcgatgcggtgctcgcccccaagccggggtatccgctgatcgaatccatcgcccgcctggaatgcgtcgacactatcgaataccagctgcgtttcgacgggtcatggtacatcgacgtcgccgagttgcgcgcgctgctggacgggccgcagggggcgcgtatacgcgctttggtgctcatcaaccccaacaatccgaccgggtcctacgtcaaggcgggggagcgcgagcagctcgtcggcctgtgccgcgagcgcggtgtcgccatcatcgccgacgaggtgttctacgattacgcgctggagccgttccccggcaatgcacggctcgccggcgaggcgggggcgctgacgttcgcgttggacgggttctcgaagatgctcgccgcgccccatgccaaggtcggctggattcaggtgtcggggcctgagacggacgttcgcgaggccatgcgtcggctggatgtcatcgccgacgactacctgccgatgagcgacatcatcgcctcccgcatcccggacctgttggaggcggcgaaggtccagaccgacctcgtgcgcggccgggtgcagggcaatctcagggcactgcaccgcatgctggagtctgacccgctcggcgtcgtctccgtgctgcgggccgagggcggctggaacgtgctgctgcgcgtgccgggcgtcatcgacgagaacgagctggtgctgcacatgattgacgcgcatggcgtctccggccagcccggctatttcttcgacatggcctcgaacggctatctggccatatcgctgctgcccgaaccggacgaattcgcgcataacgtgcgcgtcgtgctggactcggtggccgaattgctggggtgattgtcgaaggacgctctcaaaactcgcagatacaaattccacgttttctgcgttttggccattttccgccgttttcgcgtaaaagcggaaaacgtatctgcgagttttgagagcgtgctttccgctatcgtgccactttggaccgaatcaggtcctcatagaacgcggccgcggcggcaggtttcccgtcgaataccaccgcgtggtcgtcgaccaccagcgcccggtcgatcgcgtactgcggccgtgtgatcatgtccacgtcatgcgtggcgaaaatgacctgcttgttgtagccgaacagcgccttcgccacgtgggccgagccgatctcgtccaggcccttggtgggctcgtccgccacgatcgccgcgggggagaagctcaacgcgctggcgatggcgagcaggtgccgctgctcgctgttgagcgagctggccgactgccgagccacggtgctgagcccgaaatgcgcgaacaggttgccgacgatggccagccgctctgattcgggcaccttgtgctttttcagcggctggtcgatcgcctcgcggatggtcgccgcacggtagtaactgtcggggatctcctcgcggcggacacgcccgacgatgtcctcgatgcgtttgagatcacgtttgacggcggggctgagcgcggtctcgcccgcggtgatggagacggatccgctcgtggcggccaatgctccgtcgagcagcttgagcagtgtggtcttgccggcgccgttcagcccgatgaccgccacgcgcctgtcgtcgggcgtgatcgtcagcgatgtgggaagaagcccgacggaaccgtcctcataggtgtgtccggcttggtccagcgtgaaggtcacctgcgatggcaaggcttcgtccttgccgaagagcgagtcaaaaagtcccatgactcctatagtagcggcatcggcgcattcgcatcggcccgcatcgcgagaaggcccggcggccgccggtatacggtcgtcgggccttctcgtcatggcctgcgggcgatcgtcttcgcgtcaggcgaagtcgttgtcgaacatgtagatgtagtactggccgtcgggcagcagctggatggtgttgaagtggatccagtcccagctcccggatgcagccggatcggattcatcgatgccggagtggtcggtggaagccttgtaatcggggaacatctcgccgaagtcgacgagcttcgtcaccttgccggtgctcgtgttgaccttgatggcctggtcctgcacggcatggtcggatcgtgtcaggtcggtggcgagggagacgatgttgccgtcatcgtcgagcgcgtagtcgtggtggaggatgaaccggtcacccaggtcgatgatcttctccagctttccgaaccggttcatgccgacgaaatgcttggtcgacgcggagaaccacatgagcccgttgtcgtcgaacagcagccggtgcgagcggtagcacggtaataatgcgcagaggaaacgctatgtgttgtctggcgatttcctgaatcgcatgaatgtcgattatggcgggcggcttatacgtgtcgcggtccggtgccgttcgcgatacgcccgcgggcatctacagcctgaaccaggcgacggccgtgtcgtagaggaccggattgttgttgatcagcgagtcgtcgcggcccgggatgaagcaggccagcacagccaggatgatggatgccatcagcaccgccacaaccagtccgcggacgcatgagagcgccatcgggtgacgcttcgtgacgtctcgccgaggctcgttgcgttccgacggatcgggcgcaccggccgcgatcgcgtcgccgccgggatgcaggagatacagcatcggcgccagcgcggcgatcgccatcatccacccgaaatcgcagatgtagcgccatcccaggcccgcggtgtggctgtcgaacaccgccagcagcaccgccagggccagggagcacgtggcgagcccccaataacccgacctgtgcatcctgcgccgcaggaacggggccgccagcgcgagcagcagcagcgggcatgtcatgaacaggccgccggccatcggctcgtaatagccccattcgcggaacgccatgggcgtcacgccaatgaaggggaactccgacgtgaaccgcaacggcaggaacaggtaggcgcccaccgacggcaggaaattggccgtcggctgcacgaacctggtcatgtcggtgacggtcatctggtagtcattgccgaaatccagcggcgacccgaaccgggcgacgttgtaggccatcagcggcagcaccacgatcagggcggggatgatgacggcggccggcgctcgcagggcccttcgcgggggcagggagcggcttttcaacccctgcagcagcgaggtgatctgcggccagaagatcgggaagcacagcagcgcggacagcgcgaacgtgggccggcatccgaaattcgccgcgatgcatgccgcgccggcggcgagatagcgcagcgatagtggttgggcgcccgcgaccgaccagctgcccacatggacgtgctccccgcgcccgggatgccgttcgggtgtcgctttgagccacagccacaggccgagcgtcgtgaacatcagggacgcggcgaagggcacggagtagaaattcaggcggaaatgcagataactggcgttcgagccgagcaggaacatcacgatgacgatggacgtggccgccaccgatgcgttcgggcacagacggtgcgtcagccgtatcaccagcaggcatgcgaagacggcgaacaggaacatcatcagcagtatgcacacggacgtgggcagcatcatgccgccgggcgtccatagggacgttatcgcacggaacggcaggaagaacagcaccacgggcaccacgccgaaatacgaataccagtggccgccatagaaggcataatcccagaatatctgcgtcttgccggattcgaacagctgaccgcgcaccaggatgtcatgcgggtccgcagcctgcgccagctcgggggagaccggcagatccagccacacgcggccgttcagcagcgactgcgcgacatggtcgtactggtcgaagtcgtaggtgtagccatgcgggttggggaacaccagcggcccggagacgaggaattcgccgacgatgcgcaccatggtatagatggccagcggggcgaggaatgccacgagcgcccaccgctgccgtacgctcgcgggattgagccgtatgcgccacaacgcggagccgggtcgccacagcgcgaccagtagcgccaccgcggccatgatcgacacgcgcagccaactgaactcgaagggaacccgaacgttagctctgaccgcggagaacgggatacgagagcccacgggctcctcgatccacaggcgaaccgagctgcccggcttcaccttaaggtacagcgagcgcggcgccgacgtagagacggaggtgatctcgccggcgcgcgaatcggtgtcggcgcgcacgaacacgttgttcgccgctttgacgtcgcctccttcgggcgtgttcgccgtctcgatgcgcacgtatgacgacgtgccgtccgcactcacttccatgtacgccgacgtcgggtcggtgacggtgaggatgccgtcctcgccgcgtttgagaccgtctcccatgacgttcgtcgccgcggcggaatcggtgctggcaccgagcgtggtccagaacggcatgttgaacgccacgcattcgatcaccaggatcgccagcagcgccacaagcatggctggcagtgaccatcgcatgtggtctcgggaaatgacggaagaacgcaccccattattctatcggcttcatgtcgggttggattgaaagaatgtgtgccatgttccgaaacgcttcacacttcccgtcagaaggctctcttggagggctgatctcaggcctgtccggcgcgttgcgacaggtgggggacgccgccgcgtccgtactgggcgggcgtggcgttcgtatggacgaggacgggcagggaccgttcgaggcggcggtgcaggccgcggccgggtccggcaacgacacggatgcgatgatggccgcgctctcgaagcattcggtgagattgacgccgcttatcaagcgccgcgtgtttcccgacctgcccggtgtcccgcgcggtgtggcgctgggatgggcgcagctgacctcgggggagggcgccaccatctcgatagggctgttcatcgggcatgaccgtttctcgcagatcgcgctcgccgacgggaatgggcgcgtgttcgtgacctccgacccgcatgccgatacgcatgatatgaagccgcggttcatgctcgtcaaggaggaggagctggacgccgtcgacggcgcgagattcggcgcgaaggcgcggccgccgtctgcggtgacgggggcctcgaccggcgagtcggcgggcacggtccgcgcgtttcagggcggcatcgtgggacgggacgccacagggcgcatgacatggcttgcctcgtggctgaagacgggaaaccggtacaccctggagcagatgcgctccccgctgcccgcctcgctgcggcagcgtctggagtaccgtgacgccatctccatcgccttcctcgccgcatacatgctgcccgaaatgcgggggctgctcatcgggttcggatcgggcaacatcttccgtcgcctcaaccgtgaggcgccgatgggtgccatacgccgcagcatacgcgacacgatggaggctcgcgcgcacggcatgcgggcgtccggtctggaggatcatttcgccgacctgatgcaagaggccggcgccctcgaccatgcgtccggcctggaggcggtgcacggggccgaaccgctgcacctgtatacgtccagttactccggcgggtatttcttcgcgtgggactccggactggagttccgcgccgcgctgcgctcgctgagaatcgagggtaatctcaaccgtttcgccgcagtgagcgcgtggatcgaacgatccgcccgcaacggcggcgtgaccgaggacacggtcacgcgcgcgcaggccgcgcagatcgatcttgcgctgctggacgatccggcgctgatggcgctgccttgggaagggaaccccgcgatatccgaaatcgatttcccgcacgacgacggcgtggcggcgatacgacacgtgtggcggtacgcgggcgagaccgctgaccggatgcttcaagacaatccgaatcccgcgggcgggcggctcggttccgacccaggggcgtcagaatgggtgtaccgtcaggcggtgtcccggctgctgcgccagctgaggctcccgtatcgcttcgacatggaattccgtagcaatctcgaacaggggacgaccgcggtggcgttcaccacggcgggcccctccatgatgccggaaagccgctatgacgagcgcacccacgattgggtctcgttctcgcagggggaacgggccgccatgagcgccgcgtacaatctccgtgtcgggctcatcatcgcggcactgtgcttcggcgcgagcgaacgggtcgatcaggtgtgcgtgcgcatcgattccatcggtctggaagaggcggtcgccgagcaggacagcgcgatctccgatctgatgagcgcagcgctgcgatcgttcgagcgcttgcacacgggcgatgccggcgcgtccaaggccgatccgaaggacggcgaccatcacggcgatccttcgcatacgccttccgcggagccggcgtctgatgcccgcacaccgcaggcggatgccagaggcgcccaggacgcgaagacggattccgccggtgagtccgtttctgcgaccgtcggggatgatgatctgcagtcgttggagagcttcgccgacatgatgaaggacatcaatttcgaagacttcgtacgggactccccgcaggaagtccaggactccgactccggcgatacgggtcaggcggatgacgccggagcggcccccggcggcgaaggcaacgaagaaggcgacaccgaccccatggatgcgctgcgccgcagccccaccgtgcgaaacctcgtcaccgtaacgttcaccagacaggagttgctgcagcggctgcgcgaagacgcgttgcggcaccccgccgacacctatcgcctgttcggcgcggtgatggacatcgacgagcggggcggactcgcccccatcagcgccgaattcgacctgcgtgacgcgaggttctccccgacgggctcccaggaggagccggaactgtcggacaaggtcttcccggcgactgtcgccggcatcctcggcacggacaacgccgagggcctgtccatccagcgggcggacctgctgcagcgctgcgtcgacgaattccaccggctcgccgccgacgggaccctggcgtcggtctccaaggcgcagcatgcgatgcatgtcatcgaccgcgtcgccgatccggagctgtccgaattgtcgtcacgcgtcaccagtgcgctcatcgacggtaccgacacaccggacttcaccttccagctggcggacgaactcgaccgggaacgcacgcgggcccgcgacctgctgttctccggtcaggacgatcaggccgtgaccgtcgccgaagcggccatcgaacgtgtggaatcggcttatgccgacaatccgggcgtgccacggtatttcaactcgtatgccgagcgcgtcgtctacaaccgcctgttcgccacggatggcgaatgcacggtgctgatccccgacaacctgttctacgcgcacaccgagctggcggacctgctgtctcagctcaagggcgcgaaggccgcgctgccgcaccttaacgcgatggtggcgtatgctcccgcttacccgttctcgcacatgaagctcgcagtgcagctcgcccgcaacgaggattgggattccgcgcgcgcggcatgcctgaacgcgctgcgcgtggcgctcgaccgtgatgacgccgcattcgcctactaccggctggcatacgcggaatggatgcgcgaccgtttcgatatcgccgccgcggcctacatcatgagcgagcacatcgcaccggggcagatcggggcgcttgacggcgagctgagggaactgctcgcacgcgccgaatcccaatgcatagcggtgcctaccgacgtggagtcggcagccggcgtgctgcgcatgcacgatctgccggtgtggccccacacccaggccgccgcgatcgtgcgcgacgccgcccgcgtgtgcgtggacgagggcatgttcgttcccgcacggacgctgtcgatggcggccgcccgtatgaacgacggcgacaacggcggtgtcgacatggtgcagtcccagttcctgagatcgctcaactcctgatgccgtggcgcgggcgtcgccgaggcgggttcatgttttcgattacaatcgaatccagatgaattcgcacatacgaaggggaagtgatggctcgcgcagcggtttcgcaatcatccggcgaccagttggcttgggatttcgacgatccggacgctggggaggctccggcgccggtcgagaacgaaggcgccgcccggttcgcgcccggctcatcccagtgggtcgccgcgctgcagtccacggacgctgatgcggcccggctggatcggctggatgtgtcctcgctgtcgaacgaggttgcagcccgcctgtgggcgcgcgtcgcggcgtgggtcgaggccgaccagatcgcctattacatcgatgacgcgccggtctcgtccgacgcggcctacgatgcacgcttgcgttgcctgcaacggctggaggcggagttcccgtcgttggattcaccgcaatctcccacgcaccgggtcggcggcacgttctccaatgatttcgcttcggtgcggcatccgtcgcgcatgatgagccttgacgacgtgttctcgatcgaggagctgcgcgattggtacgattcggtgctgcgcgatttggactggcctgagggcaagccgttgccgatgacctgcgaggtgaagatagacggcctggcattgaatctgatataccgcaacggcgtgctggaacagggactgacgcgtggcgacggcgtcaccggtgaggacatcacgctcaatgtgcgcacgatcggctccattcccgccaatctcggcgggccggccgcggatatccccgagttcgtggagatccgcggcgaggtgttcatgcgttgggacgatttcaaggcgctcaacggtgaacaggaggatgccgggcgccctccgttcgccaacccgcgcaatgcggcggccggatcgctcaggcagaaggatccgcgcatcaccgccacaaggcggctgagcttttacgcgcatggcatcggtacgctgcgctggggctcggggcggcccgccggctcgcatgacgtcgtcgccgaccagtccgaggcgtacacgctgtactccaagtggggagtgccggtgtcgccgcacaaccgtgaggtcacgtcgttcgcgcagatcctcgacatgatcgactattacggcgagcaccgcggcgacatcgagcacgcgctcgacggcatcgtcgtcaaggtcgacgatctcggcctgcagaggtcgctgggcgcgacctcgcgggcgccgcgttgggccatcgcctacaagtacccgcccgaggaggtcaacaccgaactgctggacatcaccgtgcaggtcgggcgtaccgggcgcgtcacgcccgtcgccgtgctcaagcccgtgtatgtagcggggtccacggtgtctcgcacgacattgcacaatccgttcgaggtcaagcgcaagggggtgctgatcggcgacacggtggtggtgcgcaaggccggcgacgtgattcccgaactggtcgggccggtcgtggaacgccgcaaggggcgtgaagacgacctgcgcgaattcgtcatgccggatcgttgcccgtcctgcggatcgaagctcgcaccggccaaggagggagacaaggacattcgctgcccgaacgtggaatcctgccccgcccagctgaccgagcgcatcatcaacctggcttcgcgcaaggcgttcgacatcgagcatctgggcgaccagtcggccatcgcgctgaccaacccggaggagaaccggccggattcgccggatacgttcgctccgaacatcaccgagattctcgtcaagcccggcgaggagccggagccgtacgagcccgtggagggactgcggctgccggaacggcagaagccagtgctgtcgagcgaagcggggttgttcacactggacgccgcggcgctcagggatgtgcgcgtgtggcgcgaggccgcgatcatcgagatccatgagacggtcacggccgacggcaagaccaagcgcactcgcaaacgcatcggcggctcgggcctatggcatcaggtcccggcgttctggaccgcgcccacgccggcgaagaagctttccgcgcgacggcaggctgcggccggtgcgccggccgacgctgcggctgagccgtatccgggatatgacgtgccggccgatgcagtggtcgtgcgcgtcgatcggaagaccacgcgcaacggcacggtcgacgtccccgtgtacgtccgccccggcgagaacacgcgcaagatgttcgacgagatggacaaggcccggcacgccgacctgtggcgggtgctggtcgccttgtcgatacgtcgtctcggcccgcccacggcccgtctgatcgcctccgccttcggctcgctggaggccatcgagcaggcgggcgtggacgagctgtcggccattgacggcatcggcccggaaatcgccgaatcggtggtcaattggttcgccgccgcccgtgagccgagggattggcggggcgagacgctgcgcgcctggcaggcgtccggcgtcggggtcgccgccgccgagaccagcacgctgccgcagacgcttgctggaaagaccgtcgtcgtgactggttctctggagggattctcgcgtgattccgccaaggaggccatcatcgagcgcggcggcaaggctgccggctcggtcagcaagaaaaccgattgggtcgtcgtcggcgaaaatgccggctccaaggccgccaaggccgaagaactcggcatccccatgcttgacgaagcccaattccgcaccctcttggaaaccggcgccgtgcaatagactgccgcccctctccgctgacggagggctgtcgcggagcgactggggtggtccatgcctataaacccgcccctcagtctcgcttcgcgagtcagctcccgccggcgggagcaagtactcgccccgcgctttgcggcccatttcacagggtggatttcacgccgcctctggcacgccgtcgattcacacgctagtctggtacgcggcaataaggaggataggatacatgacagacgcacgccacatcgaggcgcagatctacgaacggctcagcaaagtcatcgacccggagctcggccgctccatcaccgatctggggatgatcgccgcaatcaacgcggtgggcgttacctcccagggcgacggcgacatgccgtcatatgacgtgaccgtgcatgtggaacttacggtcgagggctgtccgctgtcgcagaccatcaccaatcagatcaacggcgcaatcgtctcatatcccgacgcgaagctcaccccgcacatcgaggtctcatccatgagccatgacaagctcgccgacctggtggcgggtctcaaggcggagcgcaagcagaatccgttcaacaaaccgggcgtcaagacgcgcatcttcgcgatcgcctccggcaagggcggcgtcggcaaatcatcggtgagcgccaatctggcggcgaccttcgcggcgctcgggtacgacaccgcggccatcgacgcggacatctacggtttttcgctgccgaagctgttcggcgtgcacacgcagccgacgaacctcaacggcatgctgatgccggtgaccgcatggggtgtcaagctgatttcgattggcatgttcgccggtgccgaccgtgcgattctgtggcgcgggcctcgtctgcagcgttcgctggaacagttcctgtcggacgtgtggtggggggatccggacgtgctgctgctcgaccttgccccgggcaccggcgacatggcgatttcggtggctcaggcgttgccgaacgcggaactcgtcgtcgtcaccactccgcagccgtcggcttcggatgtggcggtgcgctccggtctggtcgcattgcaggtgccgatgaaagtacgcggcgtggtcgagaacatgagctggtatgagcataagggtgagcgactggagatcttcggcgcgggcggcggtcggcgtgtgtccgatcaactgaccgagacgcttggctatgacgtgcctctactcgcccagctgccgctcgaccccgatttgcgcgaggtgggcgagtccggccgtccggcggttctgaacgaggacggcgcactgcgctcggatgccctggggcgcacgttccgggagcttgccgagggtcttcttcgcagcgaatgattctcaataagaaaggtgcgaggattgcgcacaaatacgcacagtcgcacattcctaggagtggcggaatagagccgtttctgcatatttcatgtgcgtttggccggcagtcggactcgcacctttcttattgagaaccgttcgctgcgagccagtagtgcaaataacgctgccggttgacgatgtcccgcaccatctcgatgaaggcccgccttgattcctccgtccgcaggtcattcgcggtgaccatgatgatggtccagccattgtgctgcaactcgttgaaccgcgcggcgtccttgcgcatctgctcggggctcgcatgatatgcgccctgatattcgaatcccaccttgcagtcggggtaggccatatcgatcagtctggttccgtgcctaagcctcactcggtaattcgcatacggcctgccgagccccgaatccaagagaatgccgaacagaggtgtttcgggtggtgaatccgtgtcctcgacgatgtacgggagcgcctcctcgcattttctcttccccgcgaaacgggggctcgcgtcgaggtatgcggcgaagtcgtctttcctggccttcttcctgcgttcctcgcggctggcaaacgccgaggctatcgtcgccagggcttccgtgtcgcagtaggttgccatctgcgcccatgccatggcgggggaggccatccagaaccgttcatattcgtatttgcagtattcctcctttccggagaacacatggaatgtgactccggcgatgtgattgcgatcctgtgcgcgaggcacgctgacatggacgcgattcgacgccagatcggtcttcggcacgggagctccccagtatcgtatggcgttgatatatccgaccctgagcggtctcttggtgcgcatggcggcttcattgcagcgtttgcgttcgttccgccgcccgttgactatatccgtgttcatgaatcccatggggcaacggtatggaatggaatgtgccgatggcaagcgatttcggggtatgtggtcgaaggctaggcatttttggcatgtcttcggcgtgttatccacattccatgtatcagcgaacggttctcattaagaaaggtgcgagtcggttctgcgggcaaacgaacatgaaattgatgggaacggcgttattccgccgatatgagaaatgtgcgattgtgcgtatctgtgcgcaatcctcgcacctttcttaatgagaatgattcgctgatacatcgggggaggaggaaagagaaggagggagaaaaagatgaggaggggaagagagaggaagagataatggaaaagcatctatcagatgtggaagtaggagcatcctttagcgcgatgtcggcgcaaaacgttggaataccgccataaacggcttcatttcgccgtttccaagggtttttacatgacctgtaaaactgctatcgccagccatgtgcggctatttccggttaggataactagacctgcggccggggcgcatagcactggatcatggaaaaaaccgatatgcgctgcacgctcacattcttcgactccgccggcgaactgcaaccgatcatgctgacgggcaaaacgcacgtcgtctccgcgtatggccacacccagacgctcgccctcgccattcttcgcgttgccggctccggggcgtatgtctaaaaaccccgcgtgggttccataaggggctatgcgtccccgagcgcatgtcgtcgtgactgccgtgtcgtaggctcgtatcgtttcgcccacgcaccaattgcgtcattgcaggttgtagataatcgcgaccatgccgaatacacacaaaccaaactcaccaaccacggcaattgccgcgggccacagccaatacgcgccgcgatcatgctcaatcgcccatcgtgcgccatccagttcgttcgggatgacgaccgcggcgagcagcagcatcatgccgaatgctgcggcggccttcccaatccccgataaaccctcaaaggcaagcatacccaacaatggcacacccggagagaacaccgccagacgacgtgccagacggcccttcgcctcgtcgcccgcacgtttgcgcaggatgctccaaaacgcaagacccgcgaccaaagcggcacataccatcgacgtgagcagacctggaatgatattcgggtacatgtcagggaagtcctctccccaatcggcgtgcttcaacaccggttcggtgagcatgcccgccacacccaccggcatgagcaacgccgccagcagacagaacggacggcacctacggcccgtgaacccattgacaatcagaagagtggatacatgcagaggggtgcaggagctgaacatgaggaccacgatccagacgatgggacctccccaatcccccaaccaagtgtcgtgccaacgaaccccgaaccacgacagtatggccagactcgcacgctcgtactcgccatggccggtcaggtaataccatatgttcgccacatacacgccgacataccaagcgaacagcagacctatccgccacgccatgccacgcaccgtcgccggacgctccccatccccgcgttcgggaacggtcgtggcgaacatcgagaacacgccgagctcattgggctcgtcggaatcacgtctcctcccgcgccggcacccaccggccgaaccgtcctcgtccgaaccgtccattccacgggacgactccagaacggaacccaaatccgaatcgtcatccatcaccatgcgttcccccacaaccttcacgatgccctcaaccggtttttcgaacatcattgctccattcgttgtttctgtctcatggtttttcgttccacccattcgtccagctcatcgtcggtgatgtcgtacatgatttgcagcagtttcaggcagatggtcacgtcggccatctcctcggccagattatgctccggatcgggcctgccgcgcaatcgtttgctgacggcctgaatgagttcggcgcattcctccatgcacacgatggactgcttgtcccgtccgaaccgttcgacactcttgcgccagacggcgcgacggtcgacctgtccgtcgcgcatactgtccacaatgagcagagactcccgaagcacgtcggcgcgaccacgccaataaccagagccttcactggagcccgatacgctttcggccgagccaagcttgtcgataagacgctccctaagccaattcagattcttcaccgcgcccctccgtttcgtcgagtgtggcgtgaagcatcgtagtctcctcacagcatgtcttcaagtccgtcggtgacgggcggccagggcgcggcccagccccttcgcccatgacggccgccttcgcgccgtacagtccggtcagatacgcgtacaggcgggtcaggtcggcgtacacccgcaccctggccggccagaacatcgtggtgaacggccatcacctagcgccgggcatccgaacgtcgcggcaagccagccgggtgcgccggcgccgcaacgccgttgaatcctcgcgacgcatagccgctgctatgacgaaaccgaagagaacatccgcatccgaaaatgacgtcgccgaccccaaggagaagccctacgtgcccatcgagcaccgcccgctactgggagtgccggaggcggccgccctgaccgggctggacgagagggtcatccgtcaggccatacaccaaggcgagctcatcgcctgctacgccctctcgtcgaccaagcgcatccgacggcgtgatctggacgactggctgtccgcgttgccggaacggccgcgatgacgaaacggccccgcgtggttcaaaacgaatcacgcggggccgttttttgaaatacaactagaccactagacctgagctatactggcagagtaaaaaccaaccggcagtagggctcaggggcttcgcctatcagatgtggaagtacagctcgtactccagcggggtcggggccaggcgagcctggtcgatttcgccgcgcttgaggtcaagccaggtctcgatcagatcgtcggtgaacacgtcgccggcggtcaggaagtcgtggtcctcttccagggcgttcagggccgcgtcgagggagcccggcacctgcttgatgttggcgtgctcttcgggcggcagctcgtagagatccttgtcgaccggctccgggggctcgatgtggttcaggataccgtcgaggcctgccatcatctgggcggagaaggcgaggaacgggttgcaggacggatccggtgcacggaactcgatgcgcttggaagcgggggaggttccggccagcgggatacggatggcggcggaacggttacgggcggagtagaccagcgaaaccggagcttcgaagcccggcaccagacggtggtaagagttcagcgacgggttcgtgaacgcgaccactgcggaggagtgcttgatcagaccgccgatgtaccagcgggcgatgttggacaggccgccgtagccctgctcgtcgtagaacagcggcttgccgtccttccacagggactggtggcagtgcatgccggtaccgttgtcgcctgcgatcggcttgggcatgaaggtcacggccttgccggcgagcgctgcggtctcgtggacgacgtacttgtacttcatcaggtcgtcgccagcgtgctgcagggtgttgaagcggtagttgatctcctgctgaccggcgccggccacctcgtggtgggagcgctccagctgcaggccgaccttctgcaggttggcgaccatgtcgtcgcgcaggtcctggtagtggtcgcacggcggaaccgggaagtagcccttcttgatgcggttcttgaagccgatgttcggggtgccgtcctcttcggtgtcgacgccggagttccacggagcctcaatggtgtcgacctcgtagaaggagcgctgcatggagttctcgtagcgcaccttgtcgaagatgaagaactcggcttcgggagcgaaggaagcggtgtcggcgatgccggtggacttcaggtaggcttcggccttgccggcgacctggcgcgggtcgcgggagtacggctcgtcggtcagcgggtcgacgatggagaaggccacgtcgagggtcttgtgcttgcggaacgggtcgacgaaggcggtcgtgacatccgggatcagcttcatgtcggactcgttgatggcctggaaaccctgtacggacgaaccatcgaacggcataccgtcggtgaaggcgttgtcaatgaattcgctggccgggacggtgaagtgctgctgaacgccgatcagatcggtgaaacgcacggagacgtactcgatgccttccttgttgatcagtgcttcgacctcttcaggcgtgtgggcgaaaatcttattctctgccacaatcgctcctttgttcttgagaacttgtttgagaacttacaatcgacaagtctagaaatgtgagtttcacgcgctcgtcaattgggttacgattatgtttcgagatgggcaacaggcggtgtaatccgcgtttttccaatgttttgggatttatgaaattcgtcgcgtctcagtgtcgcgtttcaagtagtggacggtctgacggttgtcggtcgggacccggccggatatgggaaagcccccgcggcgatgtcccgcgggggctttcccgatgtatgaatgatgccggttcggcgtgaggttgcccgccgaagatcagcggcctcgcatcgcgcggcggctgacgtgctgcatgcgcgtgggatcgatgcccttggggatgcccatgccgttcttggtctgcagtgtgcgcagacgggcgttcagtttctccagctcggccttggtgaggatgaaacgctcgcgcgggtggatcttcgccaggagagcgttcttgtggtgcgtcgggcggtacgccttgcggcggatgatgttgctgcgcagcttcttcagcggcacctgaccctggccgttgccgaccatcacacggtacacggggatctgcgagccggcggtgacgctcttgatggactgctcctggcggtccatcgcgcgcttgacgcgatcgtaatcaccttcaccgagcaggtagatgccgttgtatccggtgccgcgccaaatggcgtccttggtgcgcggattcacccacaccggctgctcggggaagttgaagccggccttgttgatgttgcgcagcacgctgatggccgcgccggtcttgccgtcgagctgcttgtatccgaccatgtcggcgcggcgggtgagcacgatggtcgacagcagcatgccgagcatgatggcgatgagcatgaggaacacccacgtcagcaccgtccaacggaatatgatgccgaggatgacgaacacgatcacgggcacgaggaacgcgccggcgatcagcgccggaagcatcttgtcttccttgtgcgtgtacttgaagatcgttatgatctgtttgatcgtgctctgcttcttgggcttcgtctgcttggtcttctcgtccttgcctgccatcaacttcctcgcttggtctagggtgaacacactgagcgacaagtttaccagcagatgtgcccttctgccgaccatgagccgccgcgtcgctcgttcgcggtgtctttatcgggtgtgcagcggccggtcgtcggctttgagcagcgtctcgcccagcgtctcgctgaaggtgggatggggatggatgagacgcgcggcgtcggaaagcggggtgtggttgccgacgagctgttccgcttccgcgatgatgtcggatgcgacgggcgcgaccatgtgcacgccgagcacgaccctgacgccgggctgttgcgcgcggatgccgctgacgagcgacagagatccgccggagtcgctcatcatcatgcgggcgttggacatcatcgggtacacggtctccttgatatcggagaggtcgtcgcgctgtttcgcgtcggtcgcggtcagtccgacgctggcggcctcggggttcgagaacacgatctgcgggatggtgtcctcatcgagcggctttggatcgagtccggcgatggattccgcggcgatgatgccctgctcgaacgcgcggtgagcgagcgcgtgcccttcggtgatgtcgccgacggcccatatgcctgcgaccggcgtgcggccgtatccgtcggtcgtgatgaatccatggtcgtcgacggtcacgccggcgtcacgtatccaaccgtcggaggtcagcggatcccgcccgatcgcgacgagcacgaattcgccttcggcgatgtgctcggtggagccgccgtccttggcgctggtgtagtgcacgagggctcccatgttgacgccggtgtcgatgtgggtcaccgtcgagcggtcgatgacgtcgatgccgtgtcgtttgagctcacgcgtcagggtcacgccggcgcggcgatcccatccagagagcacacggtccttgcggataagcatcgtgaccttgcatccggcggcgttccacatggaggcgaattcggcggcgatcgcgcccgcgccgatgatgaccgcgttatgcggcatcgccatcgacatcgcccgcgtcgaatcgatgatcgcgccacggaacggctcgccgggcagctgccgcgggacggatcccatggcgagcaccacatcctgagcggtgatgtcgtaggatgggccgatgtcttccggcacgtccgagcgcacagaccgttgcacgccctgcccgtcagcaggtgcggcgatgtgcacggtgatgggacgtgccgcgccggtgatcgaggcgacgccccggaacacggtgacgccccgatgggcgagcagacctgccagcccttgcgtcatcgtgtcgacgatgcgcttcttgtaatcgtgcagcgtcccgtagtcgatgccgttgatggtggcggagatgcccagttcgccggcgtgccggatggagtcgattgcgtgggtggcgctgatcagcgccttcgacgggatgcacccgcggttgaggcaggttccgccgagcgttgcgtcgcgttcgatcatggccacgcgtttgccgagctcggccgcccgcaaagctgtggaatatccgccgggtccaccgccgattatcgcgatgtcaaaagcttcactcatgttcgactcctttgtgctcgtaccaagaccatccccatcgtaataccttacgcccgccggcgggctgagctgtggagcaaatagcagggctgttcgtaggccaagagcgagcaaggtgggtgctgtcttgccttcgctggcggcggggctgtcgagcgcagcgagactggggtggtttcacgcagcctagggcatacaaaaaacggcgctcccactatcgggagcgccgtcaggaaagcagcagggcggctgtcacttcggccagttgccgcgcttggggctgcgcggtttgggcagacgccagcggcgcacctgaatcgcgcggctccaggcatacgatgcggagcgcgagcccttggcaacggatgcctcgccatacttctcgatgagcttcttcttcagcttgcgccacatgacagccacgtcgatgatcacggcaatcaggtacacgtacagcagaatcatcatcgggaccgacagctgcggcgcgatggtggtgacgagaatcgagccgagcagcatgacgaacgcaaccgggatgaagaactcgccgaggttgcggcgcgcgtcgacgtagtcgcggatgtacacgcgccacggcaaccgttcggccttcggcatgcggttgatgtcgccggtgcgcatcgcctcgtactcttcgtcctcgcgcttgcggatccgctccttcgcggccttggcgctggccttgcggtccggcggcaccagaggacgcaggttacgcgcctgcgcctgcttcatcttgggggtcggacggcctttcccgacggtcttggcgggcgattcctcttcgaccggctcctgggccttgtccttcttgaaagggttccatgtcataatccgtcagaatacggccacgcctcgacgctggaaagccggacgaaccggttacaatggcagctgatatgaccatctgttccaggccggccggttcgtgccggcgggatggatgatgacgaacgcaacagtaaggagcatcatgaccgcagtgttttccgacgagctgcgcgcgcgggtcgaagccgatttcggccgcgtcgtcgatctgctgagccgtaagatcgcgctgaagtcgatttccgccgagggcatcaccgccgagcatatgaagcggtccgccgaattcgtagcggacgagctgcgccaggtcggcatcgacgcgaaggtcgtccaatcgcgcaacccggatggcacgcccggcgcatgggaggtcatcggctcgaagatcgtcgacccgcaggcccccaccgtgctgctgtacgcgcaccacgacgtgcagcctgtgccggatccgtccgcatgggacactgatccgttcgtcgccaccgaggtcggcacgcgcctgtacggccgcggctcggcggatgacggcggcggcatagcgattcactcgggcgcgatgaaggcgctcggcgacgatctcaaggtcaacatcaaggtgttcgtcgagggcgaggaggagatgggctcgccgagcttcatcccgttcatcgaggatcatcgcgacgagtttgcgtccgacgtgatcgtcgtggccgactcgggcaactggtccgccgagattccgtcgctgaccacgtcgctgcgcggcaacacctgtgtggacgtgaacgtcaaggtgctgcaccatccggtgcactccggccagtacggcggccccatcctcgatgcgaacacgctcgccgcgatgctcatcgcctcgatgtacgacgccaacggcgaccttgctgtgccgggcgtggccgcgcaggagccggtcggtggcctgcagcgcgaccttgacgaggccaccgtgcgcgaggacgccggcatcgtcgactcctatcgtctcgccggcaccggttcgctcgcttccaagctgtggaccaagccgagcgtgaccgtgatcggcttcgacgcgcatccggtcgagggctcattcaacgtggtcagccccgagaccacgttccgcctgtccctgcgcaccgcgccgagccagcacccgcaggaggcgcaggacgcgcttgccgcgttcctgcaggcacacgccccgttcggcgccgaggtgaaggtcaccaagttggagaacggcatgggctgggcgatggacccgaacgcggtcgccaccaaggatgcactcgcggccatggaggaggcgttcggcgtggcgccgatcaacaagggcgagggtggctcgatcccgttcatccctgagctgcagcgcatcttcccgtccgcgcaggtgctcgtcaccggcccggaggatccgaaggccaacgcacacagccccaacgagtcgatctcgctgcccggcttgaagaacaacatcctcacggaggccctgctgctcgccaagctcggcgagtaaggccggcagctgcctccgtttccccgggaacaggttgggtggcatacccgaaaaacgggtatgccaccggtgtgctgcgacgatgcggtgccctccgttccggtagccggcggcgtttttcggttgcccgccgtggctcttttggtggtgcggtgaacaataaagggaatgaacacatactccgaaccggatcatttgaccggctattgcgccgatgccagagtcgccatcgtcgacaatgacgagcgcgccttggagtctgtagtctcgctgtttgctgatcgcctacctcaaacgatgttatctggtcgacgactgaggggttgagagcaatcaaatcatgcaaggagcatgagctcaagccggatctgctgcttcttgatatgtcatcggaaggcatccagggtccttcggtatgtcgtagcatccgtagattcgatgggagggcctgctatgaatggacttcatagcatcatatgatgggtgaacgggatcatcgaaccaaaggcggtcgaggatgaaaaaacggcgtaatcgcggcaaaaacggcaaaacagtcggcaatggcagcatctccaagacccgcaatagcggacgtatatctgtgatatggctgctgctggccgtggtggtcgcggtgtcgctgacggtcggggcatgcgctttgtggctgcccgaccgggcacccgcactgctcggctccgccaaggagatcacgagcgcgccggccggagtgcaggagtacacgggagccacccaggtcaccatgattcccacggtctctcagacgcgcgaactggtcggcaacgcctccggcacagtgacggaggacatgtcatcgcagggattgacctctggcaagaccgcgatgaaggtcaacggagtctcggtggtggcactggcgacagccacgccgatgtaccgcgacctcgccaccggggacaaaggcgacgacgtgctcgcactcaacaacgaactcgcacgcctcggattgccggcctcggcgaaatccaccacatatacatggatcacgtctcaaggagtgaagcagctcatgagcgccgccggcaacacgtcggacggttcattgccgctgaccgacgtgctgtggatacctgccgcgagcgtgcgggtcggcgaatgggccggcactgtcggggcgaccgtggccgggggaagcgtcgttgggaaggtgcccggcagtgtcacgaaattctccatccagaacgggcagccgtcggaactcgaccggacggtcaccctgatcgggcagaccgccacgctgaaagccggcaccaccgaagtggatgacgccgagttctgcgccagagtcgccgccacacaggaattccagtcactcaccagcgacatgctcgccacaggtctggaagccagcgtgcagcttgtgaatccggtgcaggcgctgcgcgtgccggccgcgtcggtgatcggcgtcaacggcagcaaggggtgcatcgtctcgggtggcaagaccatcaaggtgtcaattgtcggatccgagctcggggcgagtctcgtcgagccccaaggcgccgatgccgcggcgatcacctcggttgagataggcagtggtctgaccggcgaaagctgccgatgatgacgggggaagatgtatacgccggtgccggagtcggtgccgcgccgcagccggagcgatcggtgagcgtacatgatttggcgcataggttccccggaacggacgtgttgttcgaacatctggatttcacagcgatacccggccagaccgtggcgatatgcgggccatccggatgtggcaagtcgacgctgctgtcgattcttgccggatgggagaagccgtaccatggcacggtggaacgcaagaacgtggaacgtgtaggctgggtgtttcagaacccgtacggcgtgcccgggcgaacggctctggaccatgtcgtgttcccgctgctggccaaggggttgcgccggcgcgaagcggagccgcaggcgttggaggccatggggctgttcgacttggagtatgcggccgaccggcggttcggcgaactgtcgggcggcgaggcgcagcggctcatgctggcccgtgcagtatgctccagacctgacatgctgctcgtggacgagccgactgcacaattggatacgcgcaccgcgcactcggtgagccacgtgctcgggaacctggccggacagggcatgatcgtgctggtcgccacccatgacccggacacgcgcgacgcctgcggtcgcgtcatcgacctggccgactacgcccccggcgataacgaggactccggttttgcccccgctggcggaaacgaacccgctgagcctaccgatcccgcccccgctggcggaggctcccgcgaagcggatgggggtggtcccaccgactcaactgacatcgccgaaaatggatcggaggtgcgctcatgagactgggatccatcatctcggagacgctgcgcaacatcgcctcgggcactgcgcatgctctcaccatgttcctcgccgtgctgttcgccggcaccctgctcggaggatacgaggcgatgtcggtcatgaggttggaaaccgaagccgcggtgcgcatccgcgcattcgccgacgtgaaaaccgtgatcggcggcaatgtcgacggactcgcctgcgaccggctctccgaccatggcgacccgtcgttcatttccggggcgatgcggtccggcccgcaggtcgtgccgctggcaacgaaaggcatcgaactgtcatcatatgaggtgaccgcgggcatgatacggctcatcaccgccgaagacccgcaggaggttccgaacccgtccggtgtgtgggtgtcatccgacgtctcccatgatttcggtctcgtcaagggcagccgcatgcagacgaatcatggcacggtcaccgtggcgggcgtgttcgattggccgaatgacggcagggacatgcggttcgcctatgcgatgatcgcaccggcggcatcgagcggcggcgtgttccaggaatgctgggcaaagcagtggccgcaaagcgaccagatggacgagctgctgttgtccaccgccacgaagaacccgaaatcggagatgcgtcccggtgtgaccgctcttaacaaggggttcgatgcgcattatgacgcgcagaagggctatctgacccgtgtgacccgttggatgccgtatcttggactggcggtcggcctgctgctaggcgtgatttcggtacgccgccgccggctcgaatatgcaggcgcgttgcactcgggcgaatctaagggcgcgcagctgctcggtatcgaactggaatcactgatctgggcaggagtcggcacgctcgcggcatgcgcgctgctctccgcgtacgcgctgcgcatgtcgcagtccgaccctcttgccgtgttgctggccgccgttcgtacgccgctcgtgttgctggccggagtgctcgtctcctcgctgttgacgggatcggtgatccgacagacgcagctgttccgctacttcaagaaccggtagcgcctaatcccgtgtcacttcgccagtcccatctggtatttcagggtcattacgcgcgttgcggaggccgtcaccttcttcgcgaaggccgggtcggactgcgcacgggcgatgataccgtcaagaatcggcgtcacatatgacgtatcgcctatgcacgccaaatcgccgccggcgtccaccagacgcacgcccaggtccttggtcgctatgccgctgaccgccgcggccgaaagggagtctgagatcaccacgccgtcatagccgacgctgccgcgcagcgtgccgtcgatgatcttgctggagaacgcggcgggcgccgacgagtcgatgcgctggtaggtcgccagcgacatcatcaccatagccggcttcgcctgcttgatcgtggtgttgaacgcgcctatctcctcgtcatcaagcgtggtcgtggtgtcgaggatgccttcggtcgtgaaatcggtattgccggtcaccgcgcccaaaccggggtagtgcttgacggtcgcgccgacgcccgcgtcgcgcatgccttcgacgaacgcgatgccgtgctgcgcgtttccgttggaatccaaaccgaaatcgcggttcagcgcgccaatcggagcgttcgaggaacgcttgacctgcaccgtccccaataccggggccaggtcgacgttgatgccggcttgcttgagctggccgccccaggtctttgcggaggagcgcagcgtgtcagcgctcatctggccctgcgccaccgcggacggcatcgtgtcgaatccactgcccttgagatgctgcacctggccgccttcctgatcggtggagacgatcagctggttgccgctcggagcatagctttgcagcgcgtcagcggcggtcttggctgcggctgtgccgttgttccagttgccgatgagcactacggaaccgacatggcgtgtgctgatgagggcgctgagatcggctggattgccgcctgcgaacatcggtgccatgatgagctgcccggcccgttcgtcgagactcatcgtggcgatggcgcggctcgccttggccgcgggggagtcatcggctgccttctgccgctcctgagatttctgcggtttcggtgtgggggccttgtcgcggttcagcgtcgaagaggaggactgtggctgcgcgagatgttcgagcgtgtctttttgctgggggcgcagcatccaccatgccgtgcctgccgccacaagggccaccacgcagagcatggccgcgatgatggtgggggctgaactggggcgcggcctcctgccgccgtgtttgatctgctgcatcctcatatgcactagcgtaggccatcatgtgtagtggttgtgaaacggttgtacgacggctgtgttctcagctcagagcatgaccagctttcctagcctttcgataggcttgtatcatgtctttttttgatatgttgggtatgttcgatcccggcgacgggccacgcgggccacgtcgggactccggtgcgaccgatgacgatccggtgatcgtcgacgtgcaggcggatggcgacgatcatggcgagacgccatccgccggcaagggggagccgccgaagcgcggcgtgccgaggctcacgccccgaccgttgccgaacgggcccagcaaggggacgaagattctgatcggcgtcgtgctggcgctggttgtcgtcgtcggcctgttcttcggcctgtcgcagttcatcacggacctgatgtggtacggacagctcggttttcagaacgtggtgtggacccagctgggtgtcaagttcggcctgtgggcggcgtatgcgttgctgatggccttggtcagctatgtgtccgcttggctggctatccgcgctcgccccgattcgtccgacggctcgacgttccgcatcaaggacgacgtcatcgaagtgggcaagtcgttcagttccaagaccgcgcgtcgcgccgccgtggtcgtgtcgctggtcgtgggcgtgatgttcggctcgcagttcaactcgaactggtctgagatcctgctgatgttcaacgcgcagagcttcggcactgccgatccgcagttcggcatcgacaacgggttctatgtgtttgtgctgcccggtttgcggctggtgatgtcggccgtatcgatgctgctgctgatgggcattgtgttctccgtcgtcacgcatgcgatgatgggcggcatccgcttcaccatgccggtgcatggtcgcggagtgctcgctgtgaccaagcgcgcccgtcgccagatcggcatctggctgatcctcaacatgctggcctggtccgcgcaccaggtgatcggcgtgttcacgcatctgacccagcagggcgaccgcatcaccggcgccgcatacaccaccgtgcacgcgaccattccggtcacgttcatcatggcggccatcaccgcgatgctcggtgtgttcctcggcgtgtggctgatgcgctcccatgcgttggaaggcgccgccaagccgagtgtccgcgccgccgcggctctcaaggcgtggcgtacgccggtgattgcgatcgccgccgcgctggtcgtctcgctggtgctcaccgtcgcatggccgatgctgctgcagcggttcaaggtgaacccgaacgcgcaggagatggaatccacctatatccagcgcaacatcaacgccacgcagcaggcgtacgggctcgacaaggtgaaggtcgaacagtacaaggccaccaccaagggcaagtccggagcgctgtcgtccgaggccgaatccaccgcgcagatccgactgctcgacccacaggtcgtcagccccacgttcaagcagctgcagcagtcgaagcagtactacacgttcgccgacacgctggccgtcgacaagtacgacatcgacggcgtcagccaggacacggtgatcgccgcccgagaactggatctggaaggcaacgacaaccgcaactgggtcaacgaccacaccgtgtatacgcatgggtacggtgtcgtggccgcatacggcaacaaggtggcggcggacgggcagccgcagttcttcgaatccagcatccccacccagggcaagctcaccgaatcgcagaagtacgagccgcgcatctacttctccccgaacgcccccgaatactcgattgtcggggctccgaagggcatggattcgtgggagttcgactatccgaccggatcgcagggcgcgaccaatacgtttgacggcgatggcggcccctcggtgggcaacatcttctcgcggcttttgtacgcggttcggttcggatccgatcagatcctgttctccgaccgtgtcacctccgactcgcagatcctgtacgaccgttcccccaaggagcgcgtcgccaaggtcgccccgtacctgacgctggacggccgcgtgtacccggcggtggtggacggacgggtcaagtggatcgtcgacggctacaccacgtcggacgcctacccgtattcgcagatgaccgatctgggaagcgtcacgcaggattccaccaccaagacgtcgaacacgatccaggcgttgggttcgcagaaggccaactacatccgcaactcggtcaaggcgaccgtcgatgcgtacgatggctccgtcgaactgtacgcctgggatgccaacgatccggtgctcaaggcatgggagaagatcttccccggacagtaccacccgatctccgagatatccggcgacctgatgagccacctgcgttacccggagaacctgttcaaggtacagcgcgagctgctcgcgaaataccatgtgtcgtccgcaggccagttcttctccggcgaggatttctggcagacgccggtggatcccaccgaatcggccacggcgcagcagcagggcgttccgcagcccccgtattacctgtcattgcagaccggcgggtcgaagaagccggtgttctcgctgacctcctcgtacatccccgccggcacgtccacgcgagaaatcctcaccggcttcctgtcggtggattccgacgcgggcaacgaaaagggcgtaatcgggccgaactacggcacgatacgattgcaggagctgcccaaggactccaacgttcccggaccggggcaggcgcagaacaacttcaacgcgaacgcggacgtgtcgaaggagctgaacctgctcgaatccggttccaccaaggtcaaccgaggcaacctgctgacactgccgctgggtggcggtctggtgtatgtgcagccggtgtacgtgcagtccagcggatcgaccagcttcccactgctcaagaaggtgctggtggcattcggcgaccaggtcggattcgccaatacgctcgacgaggcgctcgaccaggtgttcggcggcaattcgggtgcgtccgcgggcgatgccgagaattccggcaacacgtctcaaagcggtgacgggcagaacagtgacgggcagaacggcactgactccggtgacagcagcgagagcaacggcaacgcgaatggcagtggtacgaacgagggcaaggaccagaacggttcctcctcgcagagcggcagccaaagccccgagcttcagcaagcgctgaaggatgcggcccaagcgatgaaggactcccagtccgccatgaagaacggcgactggaccgcctacggtgaagcccagaagcaactggaagaagccctcaacaaggccatcgaactcgacggtggcaagtaagagccaaaccagaaaaccccagtactgtgaacgcccccacaccgggggctgtcatgcgcagcatgactgggggtggttctcggcccagaacggcccccagtcatgctctacccatctgaccggctgattcgctcccagcccgtgtgccacactaggcgaaaaacaccccaaaatcgcatggtgtggtacagcagaaggccacaccatgcgatgtgagccttcacatcatgtggtgtggcagaatgcgagtcgtgaaaaccgccattttccaatgaccggtggatgagcccggaatcacccttggccacaccagccccaaaaccctcaaaaatcgcatggtgtggtacagacgagggctagatggcagtcggtcggtaaccatccccacaccttctctcgcggaagtcccatccggcggtcttcaaacggaactttcgcgggagggagggagctgactagtgggaaaggggaacctgactagcgggcggcgatgagatcgaatacgtgctcgactacgcgcgccgtgcaggagccgtgctcggggatggccacgttgcgacggatgaacgcctgataggcggcatggtcgaaatcgtcgtgctcgatggctctcacgatcgcctcggcatcatccgtgaacagcgtcgggatatcgcgcttcgggtcgatgtacaggctgcgtttcctcgaatagtccggccagtcgtacgcatagaggaacaccggcaggtcaagcagtccggcctcatagatcacggtcgaatagtcgctgatgacgtaatcggcgacgaacagcatgtcgtactggctcggatagtgctggaacacgtgcggattgttgatacgcaggtcgtccaacggatggcatttcacgatcaggttgtacttgtcgtaatcgatggcatcggcgagggctgctgccgcctgagtctgattggcgggcgtctttttgcggaacgtggggcagtagacgatgttgagcttgcgcccgagttccgggaactcgcggatgatgcgttcgcgctgctgcgcccggtacgagctgttgatcagcagatcggtgcggggcagtggcgcctcgtagatgatggacgggtcgatgtcgaagccgcgagcgtaatcgctgatgaacgatttggatgagatgagcacggacgtgtacccgcgatgcatgttcagcagcgaggcggtggagaacttccggccttccttggagcccaacgcggtgtatccgaacttcttcatgttgccgagcgcatgccacatctggatgacgggcacgtcgatgtagccggcgagcaggcttaccacgatggcgtaggtgtcgagcagcaccgcctggctggtggcgatgaaatacagctgccggatcatatggaacccgtatcgtaccgggttgtgcagcttcttggcgaggatcaccacggaataatccggatgcgtctgtctcacataatggcggatgagccggaaatcggtggtcggtcggtcgctctcgcgactcaggcacacaatcctacgcttgcgcgggaacgcgcggaagaacctatatgtaagaaacatcatcatccgaactgcattaatcagatgacgtttcattcttgttctcccttaccgaagcatcaggttggtgtgttagccggtctaccgtaactgcaactctattatattacatgggttaccacaaggggaaccacaaggtgtcgtaaaggagcccggggatgtcactggacgttcaccaaatccgctggcggtcaagttacttggagattgactattcctcgcgggatggtggtgtgccgtggctgtattgcgtgggacgttgccagttcgttccgttcgagatcgtcgggcttgagagcggtgtccgccgcgcccgcctgaacctggtgctcggggacgggcgcgaggtgcttcccggcggccaatggatcatctgcgagaaaatcaaggagtcggcgctcgtcagtctgcaggcgctgtacgccgaatacccgctcatgccgcagcgcgtcgactacgatgtacgtcacctgctgcccccggagttgcgtgacgatgatgaggcggtcgcacagtacaccgacgaagagcgtctggaactggtggcccggcacccctatgtcaccagcggagtcacctacgacgatgaggtgctggagcggcttgacaatctcgaccgcgtgttccgctacggcaagaacagctacgcctatactggtgtgttcgtgcccaagacgaatcgcgccggtctcatctatctcgcgttgcacatgcagttcttccagcgcaacaagaccccgcgccaccgtcagcgcagccgtcgccagatgcagaaggacgttttcgcggcgacgtactcggtgatgaccaagctggtgccgcgcaagcgcaatcgaatcctcttcctcaaagagaacggcgagggtccgacggagaatatggaggcgttgcaaagccgcatgatcgagcgcggcatggacaagcgcttcgacattcgtgcccggtaccgcaacgtattcgcgggcaggcagaacatcgtcgcctggctgcgcgacctgttcgagatcgcccgaagccggtacgtcttcatcgacgattacacccctgtattcaacttcatcgaccccggtgaagatgtgacgctgacgcagatctggcatgccggcgtcggtttcaagtcggtcggctatgcccgttttggtctcaagggctcgccggatccgtacaattccgcgcaccgccgatacacgtacgcgctggtcggcaacgagcacctgcgtcgcatctattccgaggtgttcggcatcgaggaggaggcgctgctcgccacaggcatgcccaggctcgaccatttcctcgatgagaaggtcgagaaggaataccgcgaggagatggccgacaagttcccgtggtcggccaagggacgcgtcatcgtgttcgctccgacgttccgcggcaccggtcagcgcaccgcgtattacccgtatgacgagatcgacatggatcgtctgtaccgcatgtgtgtcgagacggacacgtatttcgtgttcgagatgcatcatttcatccgcaagcgtccggatatctctgccgagtacgccgaccgcatcttcgacctgtccgatgagagcctgacgaagctgttcttcatcgccgatgtgctggtgaccgactattcgtcgtgcttctacgactacctgttgctcaagaagccggtagtgttcttcgtgcccgacaagaccgcgtactcgctgatccgcggtgtgcagcggtccatcgacgagatggcgccgggcgtggtgtgcgatacgttcgacgagttcctggacgtgctgaggactcgccattatgagacggtttcccctcacccctcgtccatcgaccgcgccgccgagcgcagcggactcgccagcgaccgtgccatcgacactattatctacggcaaggatgttccgggtgtgcgcaaacaggcctccggtaagggaggcgcggtgccggtccggcagtccgacaagtcggccaagtccgaaaggaaggcaaaggaactgctggattccaaggtcgccgacaaggataccaagtccgcctccgacgaggaggagtgagcgtgccggggaacacgagcatggccgtcgcgcccgccgccggcgccggtgagccgggcagtggctccggcgagactgcccggcacgcggcaccacgcggcgccgggcgcccatcatacgagctgctgtccaaataccgcggcgtgctgatgggcgtgcagatcctgctgatcatggcgttccactacaccgaggacctgtcgaacgcggccgaccatttcaacggtcccgctcaggtgttctacgactatatcggcagttccggcgtcgacatgttcctgatgatctcggggctgggcctgtactactcgtggaagcgcaacccggacgcgggggcgttctaccgcaagcggctgacccgcgtgctggtgccgtacgtcgctgtggcgctggtcgggtggatctggttcgacttcgtccattcggatgccggagtggtgcgtttcctcgccgacatcgcattcgtcacgttcttcacggacggtgtgaagtggttctggtacatagcggtgtgcctgatctgctatgtgctgtttccgctcgtgttcgccgtcgtggacggtacccgaaacgtcgccgcggcatgggcgcgaacgttggcattgtgtgcggccgcggtgctggtcgcggtggcgctgtacaggttcgcgccgtctttctacgacaacgtcgatctgatcgtcaaccgcataccgtgcttcatcttcggcgtgctgctgggaaggctctcgcatgaacgtcgtccattgcccatgcccgtggtcgccgcatgcatgacggccgtggccgtcatgctctacccgatgcagctggttgatgtccctctggtcaaggtgtaccttcgcgcggcgttgaacctgctgctgtgcatatgcggtgtcgtcatcatggacgtgatggcccgcgcggggaagcccgcgctcgcaggccttcacgacgtggtatcgaaagtgctgagctggttcggacggtattcgctggaactgtatctgcttcacgtgatgattcgcaagatgctgaacctcaacgacctgccgaccacgcacctgcgctatgaggccttcgtgatcatcggcgcgatcgcgctgtcgatacccctgaaacggctgtgcaacctgattcagcacaggctgctgcgtgggaaacgtttacttaattccaaagagtacaggggcacatatgcggcttgatgcaccagcgggcgaaaatatggctgtattcgtttcacatgcctttgttctatatttgaaccctctgtcggtacctcacatagatggcccgttcctgttcgggccgaaccgtttcttccgtgactacctagagggacgcaatatcgcatttgaggatcaagagttgcaggtggatttctcttccatgaatgagatgggaataacattcatggaagaatggaacaagatgtccgctattacgccgatgactatgccgcctatgtgggccagatggtatcgggttgcgagatcggcgccgagcgtattcttgaacaccttgacatcgaacgtttgaaaactgagaacaagaaactatccgagaagcgaaagaagctcgaagcggatctcaagaaatctcgcgccgaggtccagaaactccgtaactcgaagtcgtggaaggtcactgtgccactgcgggcggtcatgcgtctgtttggaaagggctgatggtgatccgtcttagtgcactctgcgtgcctaataccacagaaaggtgaatgctcggtaaataagtcgtgtctggaacatagactacgtatgagttaacggggctgcaagcccgaaagcgcatataacgatggagagagcatgaacatcgctgtcatttttgcgggcggcaccggccaacgcatgaattcgcgaaccaagcccaagcagtttctgctcgtgcacggcaaaccgatcatcatctacacgcttgaggcgttcgatcagcatcccgacatcgacgccatcgtcgtcgtatgcctgaaggaatacatcgacgttctcgaacagctcatcgccaagtttggcgtcggtaagatcgccgcgatcgtgccaggcggctcatccgggcaggagtcgatccgcaacggcgtcgacaaggcgaacagactgtatcccgcggattcggtcgtcatcgttcatgacggtgtcaggccgctgatcgaccagcagaccatcaccgactgcatcgtcagtgtgaagaagaacggcagcgccgtcaccgtcgtacccgccaccgagaccatcgtgcaaagcgaggacggcgtgatcaccaacatcatcgaccgcaaacagtgccagctcgcccgcgccccgcagtgcttccgcctcggcgagctgcatgacgcacaccacaaggccgtggaagaagggggggggctcgacttcatcgactctgcgtccctcatgttgtactacggccacaaactgtacgaggtggaaggcgccaactcgaacatcaagatcaccacgccatcggacttctacatcatgcgcgccatcatggacgcggaggaaagctcccagatcttcggtctgtgacacgaacacggaggacaacgaccatcatgtttgatctgcaagaggaatatgcgtcactggcgcagcatctcgacatcgactgggatgcgctcgccggccggcatgtgctcgtcaccggcgccacgggccttatcggctcgctgtgcgcccgcacgctgctggaacgcaaccgcttgacgggggcgggcatcatcgtggacgcgctggtgcgagacccggccaaggcacaggccatgctggggcagtacacggccgacgacgggctcgtgctgcatcagggatcgctcgaagatgtcgactcgctcgacctgccggcggactatgtcatccacaccgcctgtccgaccgcatcgtcgttcttcatgtcccatccggtcgagacgttctccgcgatcgtagacggcaccaggtcgatgctggaactggcgcgacgccgcggcgcggcctccttcgtctacgtctccagcatggagatctacggcatgggcaacaagcagcgcggcacggaacacctgcttgacgagagcgccgtcggctacatcgacccctgctcggtgcgcagctgctactccgaaggcaagcgcgccgccgaaaacctgtgcgtctcataccattccgaataccaggtgccggtcaaggccgtccgcttggcgcagaccttcggcccgggcatccctcgcgacgacgtccgcctgttcgcggcgctcgcacgcaacgccgtggccggcaaggacttcgtcatgaagacgaccggcgaaagcacacgaatgtactcatacaccgccgacgcggtgtccgccatcctcaccgtgctggtcgcgggggagaacggcgtctcgtacaacgtggccaatccctccacctactcgtcaatccgcgagatggccgatatggtgtaccgcgaattcggtacgggcgacgcgcgcgtcatcatcgacgtcgacccgaacgcgccctacccgccggagcaccacctgccactcgacgtgtcacgccttgaggcgctcggctggaggccgcaggtaggtctcgaagacatgtaccgcaagctcatcgcatacatgggctgacctcgcgggagaccgcacctgaccatgagaagacaagcagatttggaagaacattgtttgcaacactgaagcaagtcgtcggcgagaactggcattggcgacggcaggtctggaatctggcgaagatcgatctggtgaagacgtaccgcggtgccgcgctcggcaagatctggctgttcgccaaaccggccgtgtacatcctggttttctgggtggcactgaaattcggtctgcgcagctcgtccgacgtcaacggcaagccgttcctgctgtggctcgccgccggtgtgttcccgtggttcttcatgtccgacatgattactaccggcagtgacgtatatcgtcgatacccgtatctggtgaaccgcatcaaattcccgctgtcgctgatctccacgttctacacgctgtcgctgctcatcatcttcgcgtgcatgatggcgttcaccactgtggtggcgctgctcaccggcgtgcatcttggccgctacatgctgcaattgccgctggtcatggtgttcatgttcctgttctgggtggcgtggtccatggctttgtcgcctttgagcgcgatatcgcgcgatttctcgaacctgctcaagacgcttggcaccccgtttttctggctgtccggcatcctgttcgacatcagcggctggccgcgtgccgcccgtctggtagcgtccttcaacccggtcacatgggtcgtgcagtcggtgcgtgactgctttatctacaacaaatggttcttcacggattgggagtcgttcctgccgttcctgttcgtgctgctgatcttcgtcgtgctcgcgctgcacaactaccaccgtctgtacatggaggtgccggatgtcctctaagctcccatcgaatgtcacgcgaatgggcgatgccacggtcatccgcgacgaggacgcgagcaatcccgtcgccgtgcgcttcgaccacgtcaccaagcagtacaagctgttcaagaacgacaagctgcgcctgctgtccaccttctccaagcgcattccgcacgatacggtcaacgcgagcgacgacctgagtttcaccgtgaaccgcggcgaatccctggcgctgctcggcgacaacggcgccggcaagtccacggcgctcaagatgatcaccggcgtgtgcttcccgacgtccggcaccgtcgaggtgcacgggcgcgtgtccgcgctgctggagctttccgcgggcttcgacatgaagctgtcgggcatggagaacatcgacatgcgctgccagctgtggggtttgtcgaaagaggagtccaaggagctcattcccgagatcgtggagttctcggaactcggcaagtacatcgaccagccgatgcgcacgtattcgagcggtatgcgcgcccgtctgggcttcgcgttcgtgtcgtcgatccgcccggacatcctggtggtggacgaggcgctgtccgtcggcgaccgcaagttcgcgaagaagtgccgcgagcgggtcaacagcatcatcgccaacgagaacgtgaccgtgctgttcgtcacccactcgaccggcaccgcgaaggagttctgccacaggggcatcgtcatccagaagggcaaagccatgttcagcggtggcatcgaggaggccgtcgacttctacaccgcctcgtgacgcttcgaccgttccgttgacggcgttgccggcaagcggcacggccgacgtccattgaccgcgttcggtcggatggccgggacaactcccgcgtttcgcgattttgcggccgttgtccacgttcctgtcggcggatcgagacgaatcgcgcatcatgcatcgctgacgccagtctcacccgccctatcccgccggcagggcggttgttatgcttgaagacatgtcctataccatccgcgcggccgttgacgccgacgttccggccatcgccgacatctacaacgaggcggtgatccgtgggggagcgtccgccgaccttgaaccggtgtctctggaaagccgtcgtgcgtgggtcgactcccatcagccacgcgccaagtatccggtcgtcgtcatcaaaggtcccgaaggcaccgtcgtggggtttggctcgctttcgaaattccatcagcgggccggatacgacgacatcgccgaactgagctactacatcgccggcgaccaccaacgccagggactcggcaccatgatggtgcgatggctgatcgatgccgcggcagagcgcggattcacgcatgtcacggcgatcatctacgccgacaacgccggctccgtcgcgctcatgcggcggttcggattcatccggttcggcctgcttcccgccgcggtgggcgcgctcgacggcaagctgcatgacatgagctattgggtcaaggcgttggcgggtggggtacaatccttaaggttgaagacaggagagtaacacatggcatccgatttctggctgatcgtggggctgggcaatcccggcaagaagtacgagggcacccgtcacaacatgggcttcatgaccgccgacatattggccgaacgctggtccgtcgccttttccgaccacaaggggctcgcgatgctcggcaagggcgcgatgaatctgcagggtcgcaacgtcaagttcttcctcgccaagccgctgacctacatgaacgactcgggcaacgcggtcgcctcgatcagcgcgtactatcagatccagccggatcacgtcgtcgtcatccatgacgacatggatctcgaattcggccgcataaaggtcaaggcgggcggatccgccggcgggcacaacggcatcaaatcaatcgacaaagccctgagcaccccgaagtacgcgcgcgtgcgcatgggcgtcggccacgctcagcgcggagcccacgcgcacgacaacaccgtcaactgggtgctcggcggtttcggacccgaccagcgcaagcagctgccggaattcctcgcagacggcgccgacgcggccgaaaccatcatcttcgacggactcgccgccacccaggagaagttcaatggccgctgagcagggacgcgcgcgcggcaaagcgtccgccgccaccgccgctgccacggccacacgcgtccagaacgcgctgatcgacggctccctgtgcggcatcctcgaacggctcgatgaggatccggcatttcatcggctcgtcagcggcggcatgagcatcgccgacgacaaggacatcgccccgatcatcactgtgggcgccccggacgggttgcgcccggccatcgccgcagcgcaggcggaacacacccccgtcgtcctggtcgtggcctccagccgcgaggccgaggacaccgtgaacgcgctgcggtcgtggtacgacggcgacccgaacgacatcgcacaactggaggcctgggagacgctgccccacgagcggctcagcccccgtgccgacaccgtggcgagccgcatggccgtattccgcaggctcacgcaccccagcgacaccaatccgatgttcggaccgatccgcatactcgtcatgccggtgcgttcgctgatccagcccgttgtcaaggggctcggcgacgtcaatccgctcgtcttcacgcaaggcgaggagctgcctctcgacgacgtgtcgcgccgactggttgagaacgcctacacgcgcgtcgacctggtgatggaccgtggcgagttcgcggtgcgcggcggcatcatcgacgtctttcccccaaccgcgccacatccggtgcgcatcgagttcttcggtgacgagatcgactccatccgagaattccacgcgtccgaccagcgcacctacggcgagggcgtccgtacgatctgggcgacgccctgccgtgaactgcagctcaccgacgccgtgcgggaccgggcgaaacggctcatcgggcagattccgaatgccgacgacatgctggagtccatcgcgaacgcgattcccatcgaaggcatggaatccctgatgcccgcgctcatcgacgacatggaacccgtgaccggcatgctcgacaggcatgccatcatcatgctcgccgactcggaaaagctgcgccgcgcggcggacgacctctcgaaaaccgcgaacgagttcctcgccgccagctggcatgtcgccgcggccgggcacggtgccggagctcccatcagcttcgaccaggccagcttcctcgactacgaggagaccatcaactcgctcgcatactccagccacgacgtgtggaacctcaccagtttcggcgtggacgccagccgcccgaaccacgtgcagctcgccgccggcaacccgggcgaataccgcggtgacgagacgaaggccgcggccggcatcgaggggctcatcgacgcggggtaccaggttaccgtcaccgcggccgcgcagggcacgctcgcacgattgaagcgagccatcaacgagaccggcatcgcctcgttcgacgtcatccgctcccaggccatcgacgggttcatcgacacggcggcgaagaccgcgctgctcaccgaacgcgacctgaccggacggtccagtgcggccggtcaggcgaagacccccaagcgccgccgcaaggcaatcgacctgatggagctcaaagccggagactacgtggttcatgagcagcacggcatcggccgtttcctggagatgcggcagcgcaccatcggcaccggggcgaacaagaccacgcgcgaataccttgtcatcgaatacgcgcccagcaagcgcggcgccccggccgacaagctgttcatccccaccgatcagctggatctgatcagcaaatacatcggcgcggaggcccccaagctcaacaagctcggcggctccgactgggccgcaaccaaggcgaaggcgcgcaagcacgtgcacgagatcgccgaggacctggtgaagctgtactctgccaggcagcgcaccaaggggttcgcgttcagccccgacacgccatggcaaaaggagctggaggacgcgttcccgtatcaggagacgacggaccagctcaccaccatcgatgatgtcaagtccgacatggagaaaccagtgccgatggatcgcctcatctgcggcgacgtcggcttcggcaagaccgagatcgccgtgagagcagcgttcaaggccatacaggacggcaagcaggtggccgtcctcgtgccgaccacgctgctcgtgcagcagcatcacgagacgttcaccgaacggtacgagggcttcccggtcaccgtcgcggccatgagccgcttccagacgaccaaggagatcaacgagaccatcgagggactggagacgggtggcgtcgacgtcgtcatcggcacccacaagctgctcaaccccaagatcaagttcaaggatctcggccttgtcatcatcgacgaggagcagcggttcggcgtcgagcacaaggagacgctcaaggcgctgcgcaccaatgtggacgtgctctcgctgtccgccacgcctatcccgcgcacgctggagatggcggtgaccggcatccgcgagatgtctacgctcgccaccccgcccgaggaccggcttcccgtgctcacctacgtgggcgcgtacgaggacgctcaggtcacggccgcggtccggcgcgaactgctgcgcggcggacaggtgttctacgtgcacaaccgcgtgcaggacatcgcgaagacggccgcgaagatccacgagctcgtccccgaggcgcgagtcggcatcgctcacggcaagatgggggagaagcagctcgacggcgtaatccgcgacttctggcatcgcgacatcgacgtgctcgtatgcacgacgatcatcgagaccggactcgacatctccaacgcgaacacgctgatcgtagaccacgccgaccggttcggcctctcccagctgcaccagctgcgcgggcgcgtcggccgtggccgcgaacgcgcgtacgcctacttcctgtacgacccgtccaagccgatgacccagcagtcgcacgaccgcctcgccaccatcgcgcagaacacggcgctcggaagcggcttcgacgtcgccatgaaggatctcgaactgcgcggcaccggcaacctgctgggcgacgaacagtccgggcacatcgagggcgtcggcttcgacctgtacgtgcgcatggtctcggaagccgtcgaacagtacaaggagccggagcggaccgagccggtcgcggtcaccatcgacctgcccatcgaagcgtccatcccggtggactacatcgattccgacaagctgcggctcgaagcataccggaaactggccgcttcgcgcaccgatgaggacctcaaggaactcgccgacgaactcacggatcgctacggaaaactgccggaggagttcgagacgctgttcggcgtggcccgcctgcgcatgaaggcgcgggaactcggcatatcggagatcgtcgcgcagggcaagaacgtgcgcgtcggcaagatcgacccgcccgaatcgatgcagatgcgcatcaaccgcatctaccgcggggcgcaataccggccggtcacgcacacatacctgatccccgcgccgttcgcgggcacgctcggcggcaaaccgatgccgggcgatcaggtcatggactgggtgagcgacctgctgcacgacttcgcgtggaagccgcaaccgaggaaggcatgatgggctccggatccccgttcgaaggcatgcccggaggcatcggggagcagaacggcatgatccggctgccgtaccatcccctgacttcgctgatccggcatttcgacaatggccagaccctgacgctcctgcactcggggcggggcagacggtattcggtgctcggactgcacgcctaccatcggctcatgcaatacggcgatgacgtgatggaaggcaccctcgtcgtctgcggagacgacgatgtctggcgggaccggctgctccccggccaagactcgctcatgctgctgcacgaccagctgcgtgacgagcccggcgtgctcggattcatgtcatatgatgacggccgacgccgggaaggcgtgcgatcccggttcgacggcggcccgcaggcggcagagcgaaagacgccgccggacgccgcatggtggagtttcgacgacatcctcatcgaagaccggcagcggcgctcgctgaccctgctcagccatcatcgccacccggacagcgcccggaacatcgccgccatacgatccgtctgccagtccgttcccgctggcgggggctgtcgcgaagcgactgagggtggttatccagactccccgcacacctcagcctcccaccgcggcgcatggcgctgcgaccacgatcgcgcctcatactgcgaggccgtggaacgactcaaatcgcacatgcacgacggcgaagcctacgtagtgaactattcgttgcgtctcgacgtcaccagtcccgtgacgcccctggacatgttcctgcgtctgaacgacgacaatcccgcgccgttctccgcgtatgtcaacggcggcggatggcagatcgtcagctcgtcgccggaacggttcctcgaatgccgcagcggccatgtcgtcacccgccccatcaaaggaacgcggccacgtggcctcaccgtgcaggaggacgcggccaaccgcgccgcccttgagtaatccggcaaggaccatgatgagctgctcatggtcaccgacctcgaacgcaatgatctgagccgcgcggcgactcccggaaccgtgcaggtcacggggttcgccgaactggagacccacccgcacgtgttccatctggtgtccaccgtcgaggccgaattgcccgatgcccgcgatctgcccgaactgcttgccgtcatgtcgccgggcggatcgatcacgggggctcccaagcgccgcgtcatgcaactcatcgaccggtatgaacggtcgcctcgcggcgtgtacaccggctctctcggctacatcaccgccgatggcgactgcgatctgagcattctgatccgctgcgcgacgcacgtcgggcgatgtgacaaggcgggcctgtaccggatcggcgcgggcggcggcatcaccatcgaatccgacccggacgccgaatacgacgaggccatgcagaaagcacaggcgctgctcgacgcgctggactgtgacgtgtcggacagtgacgtgcatgacggaagacaaggacaatggcatgactaatagcaatggcacgcctggcggcgaaggcacggccgtcacattcgctctggatgagggataccagttcggcctcggcgtattcgagaccatcaacctgaccggcgggcgactcgtcatgctcgaccgtcatctcgaccggcttcggcgcggagcgcgggcattggatatcgacgcgccggacgatgatacgctgcgggctcatatcgccgaacatctcgacgcggcagaattgcctgacggtcggtcgttcgcggtcaagctcatggtgtcgtccgcgaacgtcatcgtcacgcatcggccgaacccgtatgcggattgggcgcaggaccgcggtctcaggcttggctggtgccgcgcctggcgcaacgagtgttcgccgctcacggcgcacaagacgctgaatcagggcgacaacatactcgaatcgcgttcggctcggcggctcggcttcgattccgccgtgtacctcaacacgcgcggcgacatctgcgagaccaccaacgcgaacctgttcttcgtgcgcgacgggcggctgtacacgccggacgagcgatgtgggctgctacccggcaccgtgcgggcgtggctgtgcgaacgatacgaggccgagcaggggaccttccgacaggattcgctggacagctgggatgaggtcttcgccaccaacgccctgatgggcgtgcgcccggtcgtcgagctgggggatgcgggctatggaatcgggccggtgacgcgggcgatccagcgcgaataccgtcggcttgagctcggtatcctctgaccgccctcagtcggctccgccgccagtcctcgacagtggcggcggagccgactgagggcggtcagatgtacggaatctgtctatatccagccgaatgttagcgctcatattatttttccgagaaattctggcactcgtccacaaaaggcattattcttaagtctgtcatcacaacctaacagtcttaaggagtagttgtggcagctattgaaagcgtttacgcgcgtcagatccttgattcccgtggcaacccgaccgttgaggtcatcctcgacaccgaagacggcgccgaaggccgcggcctggttccgtccggcgcttccaccggtgaggccgaggcttgggagcgccgcgatggcgacaagtccgtctacggcggcaagggtgttctgaacgcggtcaaggccgtgaacgaggtcatcgctccgaaggtcatcggcatggatgccaccgaccagcgcgccctcgacgacctgatgatcgagctcgacggcaccccgaacaagggcaagctgggcgccaacgccatcctcggcgtctccctggccgccctgtacgcctccgccgagtccgccgaactgccgctgtaccgctacatcggcggcaccaacggccacatcctgccggtcccgaacatgaacatcatgaacggcggcgcccacgccgacttcgccaccgacatccaggagtacatgatctccccgtacggcttcgacacctacagcgaggccctgcgcgccggcgtcgaggtctaccacaccctcaagaacgtcctgaagaaggaaggcctgaacaccggcctcggcgacgaaggcggcttcgccccgaagatgaagtccaacgaggactccctcaagtacatcatggacgccatctccgccgccggctacgagcccggcaagcagatcggcatctgcctcgacgtcgcctcctccgagttctacaacaaggagaccggcaagtaccgcttcgacggcgaagagcgcgactccgcctacatgctcgactactacgagaacctcatcaacgagtacccgatcgtctccatcgaggatccgttcaacgaggaaggctgggaagactgggccgagatcacccgtcgcctcggcgaccgcctgcagttcgtcggcgacgacctgctggtcaccaacccggcccgtctgcgcaaggccatcgacatgggtgccgcgaactccctgctggtcaagctgaaccagatcggttccgtcaccgagaccctcgacgccatcgagctggccaccgagaacggctacacctccatggtctcccaccgctccggcgagaccccggacaccaccatctccgacctcgcggttgccaagaacacccgccagatcaagaccggtgccccggcccgtggcgagcgcgtcgccaagtacaaccgcctgctggagatcgaggaggagctcggctccaccgctcagtacgccggctacagcgccttcaaggcctgcaagaagtacatcgccaagtgattgtcgcggctgtaaggccgagacaatgctagcgtcgtgacaatgcccggcatattcgccaagtcgaatgtgccgggtatttttgttgccatgaacgactcgacccggaacatgcgaccacgcggcaaacgaagcaaacggcacggcaccggaccgatcgcgttcttcgtgtcgctgttcatcatcgcgctcggagccatccaactggtctccacgttccacacgtacgcgctgaacctcgcccagctcaacgacctcaagaatcaggaagccgcgcttatcaccaagaagcaggatctcgaaaacgacatcgaacgctggaacgatgacagctatgtggcgacgcaggcgagggagcggctcggcttcgtcttccccggtgagaaggcggtgcgcgtgcagcacccggaagcggtgacgggcacgagcgaggggaccgcgaagaccaaaagcggcacatccgacgggaaggtgctgccctggtacagcgagctcgaatattcgttcaagaaagccgatgagcggccatcgaaaacggcctccggcagccaatcgggcgataccggcaaagccgacggcaactccggcagcgcaaccgacacgaactcgggcgacaagcagtagacgcggccggcggcagcgtcattcatccgactgcataagccattcgaccagttattcgataagccattcgataaggagccaagctggtgaccgaaccagaatcacaagacgaatccaccacacgatatgtcgcgaaactcgccgaccgattcatgcagcagcgtgccgatgagcgtgacatcgccatcgtcgaacggcagctcggacgatacccgcgcggcatggtggcggtcggcgcccgctgcgcatgcggccggccgctcgccgtggtcacccggcccatgctgcccggcggcataccgttccccaccacctgctatctgaccagccccgaggcggtgaaggcggtgtcgcacatcgaagcggaaggccgcatgcgggcgtacaacgagctgctgcacgacgatgagacggtggccggcgagtaccgcggggcgcaccgcctgtacgtggcgttccgccatgagctggcggtgcggctcggcgatgacgaaagccgcatcgccaacgtcagcgcggggggcatgcccgaacgcgtgaaatgcctgcatgcgctgctggcgcagaccctggtcatgggggagggcgtcaaccccatcggcgatcgtgtgctggaggcggtgacggaggagttcagtccatccgtctgccggtgcggttcgctcgacgactgagcggacagacgaaaaaccgaacggccaaaagactggaaacggccgctgaacgcaatgattgcgccgagcgagacgatcatgccgggcgaacgcccccgatgatcgcggtcgcccggccggcgagacagcgggaaataaaggagatagagatgaaatccgttaccgttgcgggcatcgactgcggcacgaactcgatccgtctgaagattgcgcgtgtggacgatcagggcatgcacgagatcgtgccgaggatcctgcgcgtgattcgcttggggcaagacgtggacaagacgcaccggttcgctcaggacgcgcttgaccgggcgtacacggccgccgcggaattcgccggggtccttgcccagcacccggtggacgcgatccgattcgtagccacatcggcgacccgcgatgccgtcaaccgcgacacattcgaggatggcatcgagcagatactcggcgtgcgccccgaagtcatcccgggaacggaggaggccgatctgagcttcctcggggcgaccagcgtcgtgagccgcggcgagctcgaacccccgtatctggtggtggacctgggcggcggctccacagaacttgtgctgggcggcgacggcatcgacgcgccctccacgcaggtacaggccgcgttctcgatggacattggatccgtgcgcatgaccgagcgccacctgcgccacgatcctcccagcgaaaccgaaatcgccgaagcgatcgcggacatcgacgagcacatcgacgaggcgttccgcatggtgccggcgggacgcacccgcacgatcatcggcgtgtccggcacggtgaccacgatgagcgcgctggctctggggctcaaggaatacgatcaccgacgcgtggacggcgtgcgcatccccgtggacgacgcctacgccgtggacgacaggtttctgcgcatgacgcgtgagcagcgctgcgcctacaagaccatccatccggggcgtatcgacgtggtgggcggcggtgccgtcgtatggaactgtgtgctcgcgaaggttgcccaggcggccgcggccgatcatggcggagtcatcgactcgtatgtggccagcgaacacggcctgctcgacggcatcgtgctcgactgcggacggcggttgcttgcagaacgctgaacaagcatgacataatggttctgccggcatatttgccggcacagcccccgtggcggaatcggtagacgcagcggacttaaaatccgccgcttttggcttgtgggttcgagtcccaccgggggcaccttatcgcaacattctgggatggctgctttacatacagctgggtttgcggcccgacactgacgaaaggtgcaagatggcgaactggacgaacgtgacgcgcgagcccgagaccgggttgccgacgatgctggtgcaggcggtctccatcgcctttgtcatgtgcgtgtgcgagctggtcagcgcaccggtgatggtgagcgccgcgggaggcgcgttcgccctgatgccgtggttcctcgtcgcctgcctgttcgccgtcgcattcgtgtatacggtcggattcgtgctgctgtgggcggctgattcgttcgccgcccggctgaaacgccgcgatgcgctgatgccgctgatatatgccgtgatcggatgcatcgggttcggcatctgggggtattgcgtgtatccggcgacgatgaactcgatcatcacccgagccggtctgcccaccctgtcgcagggcgactcgttgatgatcggcatcaactgcgccgtggtgggcctcgccgcgttcttcctgggaaccgccgccatgccgcgcgtcatgaagtccaagggccggatcgccgtcacggccgcagccgtcatcgcgctcgccgtgttcggcggcgtcgtcctggcgatgacgtggtcgcatctggcgtgagaccagccattgcggaacgctgtcgtcgagctgacctgattcggcggttcggcggggcagcggagatggcgacggcccggccgcgcgcatgtgcgtggcggaggatatgatatcgcgatggtatcagccgtgaaagcgtgcataacagtgtgaagggattcgtcagtcatgttcagtgttctcgacatgttcaccatcggtgtgggccccagctcgtcgcacaccgtcggcccgatgtgcgcggcgcaggcgttcgcctcgtcactggaggaatctggcgccgtgtcgcgcgtcggccgtatccgcgtcgtcctgtacgggtcactgtcgctgaccggactcggccacggcaccgaccgcgcgattctcgccggattggaaggcaacgtacccgccacagttgatacggattacctgctttcagtccgagaacgctgcgcgcatgacggaaccatccatgtcaacggcacgaacgccatcgcatacgatgacgacggcgacatggtcttcgaccggtggaagcggctcgccccgcatcccaatggcatgcggttccaggcgttcgacgcccagggcaacatcatcgacgagcaggtctggtattcgataggcggagggttcatccgccgcggacggatcgacgacgcgctgatctcgaaccacgagcagacgccggcgtcgtcgcagtcaccggaggactccgggaacgacgagacggccgaatacggcgacggcgtgccataccccttcgtatcatgcgacggcctgatcgacctgtgtcggaagcaccatctgagcatcgccgacgtcgtctgggcgaacgaaacggcccggcgctcgccgcaggaggtgcgtgaccggctcacgcgaatctggaacgtgatgagccactgtatcgacgccgggtgcgccagcgcgacgccgacgctgccgggaggtctggacgtgccccgccgcgccccgctgatgtaccggcgtctcgcggccaacagcgacgtgctcagacgcgatcgccgcatctcttcggcgctggaatcctccgattccgcatgggtggcgttgttcgccatgtcggtgagcgaggagaacgccggcggcggccgggtcgtcaccgcgcctaccaacggttcggccggcatcattccggccgtgctggaatactactggcactttgtcgagtccgccgacgacgagggcgtcaggacgttcctgctgaccgccggcgcggtcggatacctgttcaagcgcaacgcctcgatctccggagcggaagtgggatgccaaggcgaggtcggcgtcgcctgctcgatggcggccgccggtctggccgcggtgatgggcggcactccggagcaggtggagaacgcggcggagatcggcatcgagcacaatctcggcctcacctgcgatccggtgggcggtctggtgcagattccgtgcatcgagcgcaacgcgatggccgcgaacaccgcgatcaacgccgtgcgcatggccatgctcggagacggctcccacatcgtcagcctggatcaggccatcgccacgatgaagcagaccggcgaggacatgatgtcgaaatacaaggagacctcgaagggcggtctggcggtcaacgtcgtcgaatgctaggccgtcgccgtgccgaatatggcgaatatggcggatttgcgttgaaaaatacgctgcgagctgtgcaaccggggcttggggtgctagtgtgagtggcactgtctttttacgacttgcggccatgccatgaacggcatggcattattgataggaggtaggccatggcgaacatgcctgaggtcaatgccgtgtttggcgcggctccggagatcgctttcccgtcggacgaggcgccgaagggattgaaggccgtggagatcgtcgagggtgacgggccgatggttcgccgcggcgacacggtgaccgtgaactatcacggtgtggtctggggcaaggacacgcccttcgattcgagcttcgcccgccaccagccggcaagcttcggcatcggcgtcggtcaggtgattcgcggctgggatcagaccgttcccggccacaacgtcggctcccgtctggtcgtgtcgattccgccggagtatggctatggcagccagggcatgccggcggccggcatcggcggcggcgacacgctcgtattcgtcatcgacatcatctcgacccgctgaccgtatgatggcggtcatctgacgcatcgattggatatcactgatacaggaggaacccatgggtgaggaaaaatccgttctgctgacgcaggaggctttcgacacgctgaaggatgagctggcgcatcgacagggccagtaccgcgaggaaatcaccaagcgcatcgcggcagcccgcgccgagggcgatttgtcggagaatggcggttaccaggccgcgcgcgaggagcaggcgaagaacgagggccgcatcaacgagctcaccgtcaagctgcgcaacgccaccatcgtcgaagctcccaaggctggcaaggtcggcaacgggtcgctggtgacgctggagctcgccggccgcgagatgacgtatgcgctgggctcgcgcgacatcaaggtcgcgacgaagtacgacgtgatcagccccgagtctcccatcggcgccgccattctgggcgccaacgagggagatacggtgagctacaaggcccccaacggccgtgagatttccgtcgtcatcaaggaagcgaagcctctgagctgaccatatgcgcgtccccgctgaccggggactggtgattgttgcgccattagggtcgacatgactcacttcgggctgtacggttttatgccgtgcagccctttccaataagaactacgttgtcagagccgtctcacgtgactatcattgaaccataggttgttgtgttggcctatatatcgcagatgccaattcaatggagaagacatgagggaaaaatgttctctgccgtcggcaaccgttataagtacgttgtcgccgagcttcctcccatctcaggcaatggctgcctcctgtcttacgcgcggtatgggatgtgtgtgcctaaaactccatacagtgcgaatttctgacatagcttatgtgaggagttgtttctgatgggacgttcaacgaagatttcaatcggcgttacgacggtggttatcgtagttgctgctgtcatctgatgatggtacgtacacgcccatcaatcccgccagcggcatgctcggagtcggtggacagcaggtcgctgctctctcatccgacggacgatccgccactggcgccacgcttcaggcctatgccgaggctgtggactagaaaagcgtttctaagtgcgcgccgaaacgatgagtgcgcgcacataggcacgcaaatggcccggtttgcgttcttaagtgcgcacggttgtcgtttcgacgcgcacttaggaacgctctagtgcgttgtatagcggtctcgattttgtttcgaccatcacgtgttacgacgagtgaaggcgatgttcgttgtgggctggtggccttcttcagactcgctccgcgagctggaccgaggacgtccgcaccacgaccggcaaccgcagtttcatggaagagctggccgagtgctcttggaatatgtaagcgtcttcgtgaaagcggaatggtctagggcgtcaattccgcctagagatctccgcccaatctcgtctctttatcggaacagcaaacacggttcacgattgacatgggcgttgacgctgattcatgaggggagtattctggatattatgacagacagttgtctggtaatgtccaaaggaggactgtatgaatatcaaaaacaaaaataatggcgatatcgattgccagtatgttggcgctgtctccgttggggatggcatctgcacatgagacaaccgtcagcgtcgcagacgatgccgcagcaaccacagtagaaccgcggtatggcgagaaaacgacaatgacgttgatatccaccgcgaaaaaaaccggcgttaccggttattgcctgcagccgcctagtgctgctcattactatcaggcacgcatcaccaagaattacaccatcaaacattatcgtgttgactactacgagtacggagtcaagaagcgaactttttatcaggacatgtatgagcaggtatctgaaactccatatcttgtctgcgtctcataagtttacatatcgaagggaatcatcgtgaacacgacgcgtaataaactgctgaactggtatccgatcatggcggtgctggtgctgattgtattcgtgggcggagcctggctctgggcgtaccgcacgactccaagcgcctccgcaatcaccggcgagctcaacgcgattcctgtcaatgtgaccagcgaacagctgatccgtgacggatacattgatctcaccaaagtaggagaatcctccaacgtcgcggtgaatgagtttcttgccgaagcgaaacagcaggaagcccccgtactgaaatacatcaacatggagaaggggagcctcacggctcacgtcctgtggtataacccatatgattcgaccccttgggccaaagccaaggatggttcggtcgtgatctaccacaaccagaccgggcgaatccgcgcatgggcgtggcgcaacggtgagattgtccaaaacggtgaacgctacagctccaaagcggtgacggtcacgaaggacggagtcaacaccatgcttctgccgtggcggccggctgcgcccgatgtggtcccggaagatgacgacggggcatcatcgttggcgctgtattcgtatcgttcgtgattgcatagcagcattccaccggttctgcgggggcatgggcgcatgtctttgtcgtgcatgcccccgcgcggccattccacggatggcggcgtgatgacgtcttatttggtgtccatggtcggggcatcacctgatgtgcggtgcgccgtcggtgccgcgctccaggtctatgctgaggctgtggactagaaaagcgtttctaagtgcgcgccgaaacgatgagtgcgcgcacataggcacgcaaatggcccggtttgcgttcttaagtgcgcaggattgtcgtttcggcgcgcacttaggaacgctttcatgtgttacttggcggtttgcgggggaggggagtctgattattgcggattatagcgggtgatgatggtcgctgtagcctggtaaccaccctcagtctcgctttgcgcgccagctcccgccagcgggagcataagttgtgtggggctcgctggcggggctgacctgagcggcgatggtcacggccagagatgcacgatcaccatgtagatcgcgaccatgtggcaggcgtagccggcgacggtgccgcagtggaagatctcatggaatccgaagacgcgtggccacgggtcaggcttgcgtagcgcgtagacgatggcgccgaggatgtagcaggcacctcccgaggccagcagcaccacgacggcagggccggcggcgggggagacccagaagaagtacatgaacgccacgccggagactccgaacacgatgtagacgacggtatacagccagcgcggggcgctgatccagatcacatggatgatgagcgccaccagtgtgcagctccatatgccggcgatgatggcgttgcgcatatgcggggcgagcgcgaacgacaccggcgtatatgtgcccgcgatgagcaggaagatgttcacgtggtcgatgcgccgcagcacgtcggtcacgcggggcgaccagtcgccgaggtggtaggcggctgagttgccaaacaggatcagcgagcaggtcatgaacaccgcgcaagcccatttcaggggcgcgccgtgggccaggcatatcaggacgatgtcggcggcgagcgacagtggcgtggcgattgcgtgaatccaccctctcatcaatggcttgggccgtccgtgcacgtcgagacggattttgcgctccacttccgccggggcgattccctcgatgcgcgcggcgtgggcctcgcccttggcgagggccctggtggctttttcctcggccttatgtcggatcgcctcggccttcgcgcgggatttcgctctcaccgcgtcggccttcgcctgcaatgcgacttcccgcgccttgatgacagcggctcgcttcgctgccaccgtcgcgtcgtcctgtaccgccatatgacctccccgattggttacggaaacgtaacttacgttagcgtaggttatagacttgtccgctcgcggatgtgctcatgaagtacggatgacgattgcgtcatgcatcggcatggtattgcgtatcatggtactcatggctgatttcacacacattctggctactcgacctgacttcaccgaaagcgatcgcgaatggctgcaccatctggtcgccgactggcaggtgatcgccgatctgagcttcgccgacctgctgctgatcgtgcaggacggcgacggcaactaccgcatcgtcgagcagtgcaggccctccaccgtgatgaccctgagaatcgatgacgccgtcggcgcgctggtcaccccggaaatggtgggggagctggatgccgccatgcagtcgaagaccgtgttcaggtccactgtgctcagggcggtcggcaaatccacggtctgcaacgtgtacgcccccgtccgtcatgacggcaagacgctggggctcgtcgtgcgtgagaccaacatggccacgcgcgagtcgaacggccggtacgagtccgaaagcatcaacgcgggcaagcagttgtacgagatgattccccgtggccagttcccctacgtcaacgcgatcatgagccagcgccatgttgcgcgtgtctcggacggcttcatcatgctcacgcaggagggcatcgtacgctacgcctcgcccaacgccatcagctgcttcagaaggctgggatgcctgatgacgatgcaggggcatttcctcagcgaaatcggcaccgacttgctgcgtcgcaacgatccagtccccgaggcgctgccgatggtgctgatgggcaaggatgcagtggattccgaaatcaacgccaaccgatccgcggtatccgtccggtcgctgcccctgtacgacaacaacgggcgcaccggggcgatcatcctgtgccgtgacgtcaccgagctgcgcaggcgtgaggtcgaactgcagaccaagaacgccacgatctcggagatccaccatcgtgtcaagaacaacctgcaggcggtctctgcgctgctcaggctccaggcgcgcaagacgaagtccagtgaggtcaaaaaagagcttgaagaggcacagcgccgcgtgcagaccatcgccatggtgcacgagggactgagccagaccgccgatgagatcgtcgatttcgacaaggtcatctccaacctgctgaagatgagcgtcgacttggccacgatgtgcgaccagcacatccacatcgattacgtcggcaagttcggcatgatgcccgcacaggacgcgaccccactgtcactggtgctcaccgagctcatcaccaactgtgtggagcatggtttcgagggacgcaaggaggggcatatcaccatctccgtcgggcgcagcggcaacagcctcaatgtcgtggtggaggatgacgggtcgggactcgccaacgaggaacacgacggtctggcacgctcctcgggctccggattgggcacgcagatcatcaacacgttcgtcaccaacgatttcggcggtagcgtgcgctgggagccgcgtcacgaaggcggcacccgggtcatcctcgacatgacgctgcgcgcggcgcagaacgagtgacggccgcttgacggctcgaaaacctgccgaaacatgattgaagggtggcctccctgtgggggagaccacccttttcgtagcatatggagctatgaatcggctgcggcgaggagtcggttgtgacgaggagcgactcagacctgcagctgcatggcctgggagcgacgcgcgcgcatcgcgcgacgcttcagggcgcggcgttcgtcttcgctcagaccgccccagacaccataatcctgattggtgtccaacgcgcacttcagacaggcgtcaatcaccttgcaggtgcggcagaccgccttagcttcctcgatctgctggtatgcggctcccgtgtttcccaccgggaaaaacagttccgggtccttgtctcgacatgctgccttggcacgccaatcaaaagcgctgctcatgtgtatcaccctcctcccatcgcctattgccgacgacgagctttcaagtcatacattaggtaaccacgaaacgaatgttttttcaagaggttttcgctctcaagtgtgaagaacttcagattttggccatggcgcactgtatccacagggcgttcccctcgcgcagcagcacggcgcggcccgccgtcatgatgtcatccggcccgcattgcgacagcaggccggcgggtatgccatccatcaggtccacggtacgttcccccgtggggaagactattctcgtgccgcaatgctcggggattcggatgtgcttggaggtctccacggcgaacacgacggtgacgtcgtggtcacccagcgcgtccttgagccgtgcgcatagcgggtccgtgccgaacggatcgaacagtgtgtcggcatcgtccaccagccacagcagatgcggggatacgggaggtggcgattcggaggagaaccgcacccgtctgtgatggcgtaccgtcgacgtgacgaacgcccgtccctcgcggcgtgtccagcgcacgcacaggccgagaatgttgcgtgaacggtgcgctagcaaggcgagaatcgtggacttgccgcgtcctgcgcttccgatgattccgacattgccggcgtttacggcgagttccgccacatcgatgccgatgccgtcatcggcaagggcgaagggcactgagggaacgtccgatgaccgtgcgggcagcatgtcggcctccacgatgcggggcagcggggccgtgaacagcgccgaggcatggaccagaccatggaatgccgcagctgtgcgcgcggcctcgaccatcgcgccgatgtccgatacaaaggcgcatcggaacggctccacggattcaccgtcgttgcgccatgcgcacccgggagcggacgggctgatggatgccgcccgcccgtctcccagcaattcgatggattgcaggccgtcccggacacgcaggcatatgttcagcgccatgttcgctttcatgtcggcgctgacctgtcccagcgggttctgcgtacaggcgatgacatgcatgcccagggaacgccccagcgaggcgatgcgcaccagccggtccacatagtcgggcagctggttgttcagcgcatggaactcgtcgatgacgacgatcagcgagggtggcggggattgcaactgcccgatcgagccgacacgctccgcggcgaccagatgctccctgcgtcgcagctccagctccagcgccctcaacgcgcgaacggcgtgattcagatcgaggtcgcacacgctgcccacggtatgcggcagccgctcgatgacgctgaacgccgaacctcccttgaaatccaggaacacgaaatgcagccggtcgggcggattgcgcaccgccatggccaggcaccagctttgcaacagcacggatttgccggagcccgtggtgccggcgaccaaggcgtgcggcccttggcggggcagatcgatcgtgaacggccgctgtcccgaccccatgcccacggtgacgcacagcgacggggaggcgagccatgttctcgcgatgatgcgccatggcagcggctcggcctgaagccccgtcagctcctccagtgagggcgagtgaatctgtgacgcatcctccgactcgccttcatccttgtctcgatcggccccgtccgccgatccatgatggcggccccgggctcctgccatatcggtgggccgacttgggcggccgcccgcagcgtcgtggctcgtcgtcccggattcgtcgcggcgtgacgatccacgacggtcagcaagggatgacgccgccgaagccatgcatcccaccatgcccggcgcgaccatggcggcgaacagccaacgtcgctccagcagcagcatgatgaccatcaacgcctgtgcggcgatgggcgcgaccagcgtgatcatcggcagagcggacgatccgcgcgcgcgtcgctcgcgcctgggacgccgcctgcctcggccgcgccgcccgcgcctcgaatccgggttcctgccttcgtccatgccctcagtgtggaacggcgtcgccggcatgcgcaagcttgggggaacaatgtggtcgaaggctaccgagttatccacatttcggcgtgtcgtggccggcgggtggaacacgccaaccggccacgacgaggcatgcggcctgccgcatcattctgcgatcactggttggccagcgtgcccacggcgcccggcttgtggctgcccgaagcgagctctctgaacagttcgaggttcttcgcgtcatccagcagcaccgacgagccgaccccggacacgttgtagccgggattcgtccaatagacactgccgctgatgccgttgtcggaggtggcgtcgcggaacgcgaacaccatctgtgcgagcgtgtacgggttcgtcttggaatcgacggtgatggacgccaaagcggctttcagcgtcttgttgagtttcgggatgttggtcagcgtcttgccggacatggccttcttcgcgatggctccgatgacctgccgctggcgttcggcgcggccgaaatcgcccttcgggtcggagtagcgcatgcgcgagaacgccagggcggtcgccccatcggccgtgtggcatcccgcggtccagttgagattggacagggcgtcgttcacggtctggtcatagcacaggtcgaccccgcccaacgcgtcgaccacatccttcaaaccgttgaacttgatctgcgcgacgtggtcgatcttctggccggtgatggtctcgacctgctggacgagcgccttctcgccggacagctgggcgacggcgttgatcttcatataggtgccgttcacctgcaccagcgaatcgcgcgggatggagatgagcgagcgggtgccggaattgggcttggtcagcacgaggatcgtgtcggtgcggaacccggtgatcgtcttcgcctcttcgccggtgcgttggtcggatccgaggatgagccagctggtgcctgacgtgttggccttgtcggacagccagggctgcttgtcgagatgaccgtcgacccagttccacagtccgaacgtcaccagcatgatgacgaccaggagcgccgccaaaacacttgcgacgatacgtcccacggggcgctttctgcgcatggcggtggctgccggcctcccggacatgccacggccgcctccctgtgcggccggcatgccgtaaccgtcagggctctgcgggccctgacgttgtgcggaggcgaacatcgactgcgcacccgcgccctcgcccggacgaggctggttcgaaatagtatgcgtggagcccgctgcacggcggggctggcgtcgggccgcagaagcggcgtcctgcatgggagagaccggttgcaggcgggcgtcctgctcggatgcggaccgcctggtcgacccggatacgcgacgcgatgaattcggcgtgaaactgggaatcacgtcctgtgcggccggcatgctttgcgctccctgagcgcctgccgaggtctgccgacgcgacggcacgcctgcctgcggaccggctccgggcacggcctcgccggcggccgacggacgcggcacctgcccgctggggcgacgcttgcgcgtgccggagggaatgaagctgggaggattgtcctgtgggctgactccactgtttccttcgctcatggttcctccagtgcctcgtgttctcaatcccttttacacgttgtcatgagtcattgtcgtgtccgttgcccattcctctgcagtaacggcacatacgtgaagggctggtggtcggatgtgacagggaatgaggaaggcatgggggtgaaggctgatgtctcttaccacactttcgcccttctgcgctgcattgacacggggcagacttgacaaaggtaagtcgcatgtgtgtaattaccctgatggacgtccatagcagcatcggcaaggaggagcgacacatgtggggagtggtcgacgattccgccgaggatccgatgagtgagctgtggggcctgttcaagtcggacgacgatgtttcctggcagcataaggccctgtgctcccagaccgatccggaagcttttttccccgaaaaaggcgggtcgacgcgtgatgcgaaacaggtgtgcgcccgctgcgaggtgcgcgagcaatgcctgcaatgggccatcgaacacgatgagcgtttcggcatctggggcggtctgagcgaacgcgaacgccgccgctataagaaggaacacaaggaacgtgcgtgacgcggcggccgtgcgtcgcatagactggagattatgagttccacaggcaatagcgatattcagcggattctggccgatgtcatggcgaacaggccatattcgcatcggcagaatgtcgatccgaccgtcgtggcggtggtgaccgttgaagaggacatgcggtttctccccgacaccatgggggcgctgctcagacagacggtgctgccgggcgtgatcgtcatcgccgattgcgccggcggcgacaatcctccggtgcaatcgcagttccaggtcattcctgcgccgtcgggactggtcagctccgttccgcagcccaagaccgtcacggtcgagctggtcggcgtcaagggcgcccgttcgttctatcacggcgttgccaaggcgctgcatgacgcgcaactcgactcgtccacccgcgcggtctggctgttgcatgacgattcacggcccgcggacgacacatgcctcgaatcattgctggagacgtggcgtaacgatccgaccgcatcggtgctgggagccaagcagctggactggcaggccgaacacctgcatgacgtcggcgcgtatgcgtaccggcatcgcgtggagtcgctggtggtcgacggcgaaccggatcaggagcagtatgacggccgccgtgacgtgttctcggtgagcctcgcgggcgcgctcgtctcgatcgagaccatgcacgagcttggcggtgccgacgactggttcaccacattcgccgaatcggaggatttctgccggcgcgtatgcctgagcggccggcgcgtcgtggtggtgccccaggcgcgtatcgctcatcggcgggcgcgattcgaaggggtgcgtaccaagggcggcgagcccgtggacgaggatcgtcccattgacagttcgatggctcgcatcagggggaggatgcgctactcctatacggacacgcgcctgatgatgtggccgttcgtctgggtgttcggcgtgttcgccgcgattggcaaggcgatcgcgaaactgttcgccaagcgtccgtacgaggcgctgtgcgaactggtcgccccttggacgctgtggggtggcctgcctcgcgccatcgcggcccgtcgccgcgtcagccgccaggagtcggtgccgatcgggcgtctcggcgtcctcgtcgccaaccggcagcaggtggcgcaatggcatgaccgcgtacaggcgctgtcggaccagcgccatgtcgccctgctgtcgccgctggccaaggcccacttgcgccggcgtgcgattcagcgctggctgctcgcggtggcgatggccttggtatgcttcggcgtcgtggcggtgatgcacggcaccacattgcgtgccgttctgtcgggagcgtccctgtactccgattcgctgctgccgaccggcggggacttcggtcagctgtggcgagccgccaccacgtcgtgggtgttcggtgacggcatcgccgccccgcccgcgccgtggctgctggtatggggactggcctcggtgataacggccggcaatgtgtctgccgcgatcgcgttggtgacgtttgccgcggcgcccctcatggcgttgtccttctgggcgttcgccggcgtgttcacccgttccgacgcggtccgtgtcgcatgtggcctgctgtgggcgtcgttcgcgctcggcttggggctgttctccgcaggcgatgtgccgatgctcaccgtgatggtgttcctgccggccgcgttcgccttcgtgttccgcgcggtgggtctgtatcgcaccgaggaccaggtgacggcccatccttccgttcaggctgcggctcttgcggcgttgtgcttcgtacccccggtcgccgccgagccccagctgatgctgtccctgatcgtggtgttcgtcgtgttcctcgccgtggtgccgcggcatcgcgcgatgctgctgctgattccgctgccgtcggggttcgtgatcgcgccgaccatcatcaacgcggtgcaccatgcttcggaaaggtcgtggcgtcagctgttcggtgatgtgatggtgccgttatccgccaggaacggcgctccggatgcttccgggttcgccacgctggccatgcgtgcgttcggtgtcgatgatacggccggcaacggtctggcaggcctgtcggcggccggcgttttcggtatcggcgtcctggtgctgctggccgtggtgacggtgcttgcggtggcgtcgctgttcctgcccctcgcattgcgcgcctcgcgcatgatgtgggtcgtcacgctcagtggtggggcgcttgccgtcgcatcgtcgaggatcgtcgtggccgtcgatgatgatggtcctgtcgcgggttccgtgctgcccggcgtggtgttcgcgctgcttggtctgctcgcctgtgtcggattggcctccggaatggcggtccaccggttctccctgttgcggcaggggaatggctcgcaacccgtgctgacacgtcttgaaggccgcaaggccaaaaacgccaaggtgcatgcggtgttcgcccgtatcgggcgcggcgtgctggtggccgtgctggtggccggtgccgtgtcatgcactgcggcgtcagccatggaaccggggtcgaacggtctgcacgcgtcccgttccgatgacgggctgcccatggtcgccaccgattatctcggcaaggacgacgcgcaccgcgtgctcgccatcaccgccgaatcatccaccggcgtacggtatacgacgatgcgcacgtcacgcggcgatctgatggacagctctccggcattgcgtgcccgagtcgcggatggcggtcatgactcccgcgacgccgtactgtcgtccgcgagcgcccgactgctggtcagcgccgatgccgacgcgatcgccgatatcagcgcgttgggttacggcggcctgtatgtggtccgtccatcggctgacgatggcggctcccaggccacggaacagttgatttcgaacatcacggcgagtgagggtatccaatccgtggtgagtaacacgtcgggtgtctattaccggctcacgctcgtcgacagcgcgacgcagcgcgtgccgcaggacggtatgctgaaacagcggcatcttgcctaccggtatgcatggctcgtgtgcatgggcgtggtgatggggctgtattgtgtcgtcgcgttcccgcgcagccaccgtcgtttcatcgaggaggaccaatgagcagccaagtcaaacgtggaggcaaggtctggaaggctgtggtcggcgtcatttccacggtgatcatcgtcggcctgttcgtcgccctgctggtactgacggcatcgggccgttgggtcgactccgtctcgtcggattcggcgtccgtctcgcacgcggtgagccagaggcggatcaccgcatactgtccgtcccgcatgacattgccggatgcgtcggcgtacggtgacagcgaatatcagccgagtgaaggcgacatctcgtcttcggccggattcgccgcgttcggagcggtgtaccggtctcagttcggcgcgtttggcggctccggcgataccacgcagctcaaggacctcgaccctacggataccgcgaaagtcatcgcagcctcggccgacgtcgaccgtacgtcgctgctgttcgacacgcagctgttggaatcggccgcgggcgtcggcgcttccgcgtccgtggcgtcctgggcgacgaagggcgacctgcgcggcctgtccgcgacattctgcgatgtcggtgcgctggagcagtcgttcgtgctgcctgacacgcagaccggcaccacccagcagctggtcgtggccaattcgtcttcgaaggccactgtggtggatgttcgggtgtggggtacggaacagtccggtgcgctggcgttgtccacgggaagcacgctgaccgtcgcggcgaacgccgaatccgtgctgagtctttccgcggccgcaagcgggcagaaggggctgtatgtcacggtttcgagccggcaaacgccggtatcggcatcggtgcgcgtgatcaggaccgaagggctgaacccgaagggatcggattacgccgccgcggccggggaggcgtccaaggagctcgtcttcccggccgtcgcggagggagacaaggcgacactcaccgtatacgcggccggttcggggtcgctcaccgccgcatgggtcggcgcggccgggcagtccgtccatcagtattcgggcgaccgcgtcaccaccatcgatctgggcgatgttcccaaagacgcgtcggcgctgaagatcacggcggatacgaaggtgacggcaggtgtgaccgtcagccgtgacgggaacgggaaccagtccgatttcgcgctgatcggcgccgcgcagacagacgaccggtcggccgccgtcattccctccggtcttgacggccgtgtgagcgtggtgaacgcgtctttatccagcaaacagatgcacatgaccggttacgacgacaagggtgccgcggtgggggagaagaccatcacggtggacgccggtgccgcggcgagcttcgacgcgtcggatttgggaaagaacgtcttcgcggtggccgccgacggcaagggactggcatggggtgtccggttgtccagctccgcggtgagtgacgccaagctcgccggcatcgcctacatcggtgccacgccgttgatgccgctgcaggagaggatctgggcgcggtcggatatgaccatcgttcactgacggtcgggcggcggaccgttccgtggtactccctatgaggggtgctctatgaggtttcgccccgacagagccttacaggctccaatccgggtcgatctcatccggccggcggccatagagctcggcgagccgaagcaccacctcatcgcggatggccagttccagatccatgcggctgcgtgatttgctctgtatcggcatgcggtacagcacgatgcgggcggggatgccgtggctcgcagggaaacactgggacgcgaacgacggctccggctcccaaggagccggctgcgagggcggcacatcctccacggcgaactgcaccggcttgaccagttgcggccaggcgccgttcagacgccggatctgggccgcgaccatgtcgtcgaacgcaccgctgcgggtgcggtagcgcgggagccgcgtgccgaacatcggcgtgcgcatgccccgcccgtgacgattgcgatacgttggtcgttcccatggtgcctgttgcatggactccactgtaggacaagccggcggcaatgcgttaggatacttatcatcgacaaggtttcctggggaggtgtacagatgccaacagcgaccgtgcacgcttggaatgataccggttggcgacacgacggcgcacatgcgcgtctgatcgccttcgacctggacaacacgctggccgtctccaaacaaccgatgaaaccggatatgaccgttcgcatcgaggcgctgaccgaactgatgccggtggcgattgtgaccggcggcgggcgtgaactggtcatcagtcaggtgctcgacgtgctgggtccccgagctgacctttccaacctgcatgtgatgccggcggggggatcgagctattaccgctggcgcgagggcgcatggcgtctggaatacgagaggacgctgtcggcccgggacagggacgcggccatattgtcgctgactcgacgcgcccgagagctgggcatgtggccggagcacccgtggggggagtccatcgaggatcgtggcagccagatcacgttctcggctctgggtcagctcgcgccgatcgaggagaagcgccgctgggatcccgacgacaccaaaaagcggcggctcgtcgccgcggtggcgggcgacctcggtcatctgcgcgtacgcgcgggcggctacacgagtgtcgatgtgagcgccggaaacaccgacaaggcgttcgccctgcgcgaattggcgggacggctcggcatcggcatcggtgacatcatcttcgtgggcgaccggatgacgcccggcggcaacgactatcctgccgcgcaggcgggggctatcgcgcttcaggtcaccggaccgcaggataccgtgcgtctgtgcgacatcctgctgcctttgctgggtggcgagccggttcggcaggacggatgaaccatgggatggcacggttgcgcgcgaatgctcacagaagtggtcggatcgctgcgggacgtgctgcttccgcgtggttgtgcgggatgcgacatgccggacgctgtgctatgcgatgactgtcgcgcttcgggtggcggcttcatgtcgttcgctatgcctggcacggtttcgggccgggcgattgcctgcggcgcatatcgcgggtcgctgcgccgtgcgatactgcgatggaaggatcatggcgacgaggaatgcgatggcccgttcgccgatatgatggccgacgcgctgctttcgtcgggcctgctggcttcggatccgatgccggtgacgacattggtgccggccccatcctccccgcgttcgatgagggagcgcggacggtggcatatgcgtaacgtgacgaactcattggcacggtcgctgcggcggcgcggcatggacgtcgatacggccgcgctgctgcggacgacgaagacgagcggcaaatccgtgcagatgcacggcaccgcccagcgttcgcggcgtctgcaggggcatatcgtcatcgctgcgcgcccaccctacccacgcaacgtgatcctggtggacgacatcgtcaccacgggcactacggcccggcaatgcgcgcaggcgctcaacgccgcgggaatacatgtgacaacggtcatctgcctggcgcgcaccctgcgcgccggcgaaaacacagacgactagccaagtcccctcccgctggcgggaggggacttggctagccggagggtggtcgccacccggtcgagccgcacacccgccatccgcgcagatcaccagcgcaatccagttatttccgtcgcagccgacgctgtggatgaaaactgcccgtgaccacgccccatatcacgacatccccatgttcggaggggacgaaatcggggtagcggggattctccgcgtgcagcatggggcggccgtcgcgcgacagcagtcgcttgaccgtcagctccccatcgagcacggccaccaccacatcgccgtcctcgggcgtcagcgaactgtccacgaccagccaatcgccgtgaaaaatgccggccccctccatggagtcgccggcgacggtggcgatgaatgtgtattccgggtgcttgatcacatgagcgtcaaggctgaagccctcctcccgcccgtccaaggcgggggaggggaagccggccgctaccatctcggtgacgatcggcacgggacggggatccggtcgcgcatgaaccaccgaacgtgccgtgcaggcttcgggagcgcaattccggctcacaacagggcccgcgccgaaccgtcggtcgccggctcgtcatcggcgatatggtatttcggcaacacgatctcgaaatccgcgccgcgcgggtcgtcgaccacccggaccgtgccgccgtgcagatgtgcggcccaacgcgcgatcgacaatccgatgccggtgccgcccgattcggtgccggggccgctgcgccccttgacgaaccggcggaagatgtcggaacgttcctcgacgggaatctgagacccgaaattcaccacattcgtgacgattgtgccggtgtcggcattctcccgagcctcgatcagcacgctggtgccgtccgcggaatgcttgagcgcgttcgcgatgatattggtgaacagctggcgcagccgatcctgatcgccctccatccagatatcggaatccacgtgcagcatgatgtcgtgcgcgtgcccggcgtccgcgatctccagcggctcgatcgtctcgtcgaggaaatcatgcaggcagaaacgttcgatgttcaggctcgccgcgcccgcctccatgcgagacagatcgagcaggaacgctatcaggtcggatagccggtgcgtctggcccagaatgccctcaagattggccggcgtgggctcgaccaccccgtccgccatgttctccaccatcgcctgcagcgcggagacgggggtgcgcagctcgtggctcacgttcgccaccacatcgcgcctcatctgatcggcgtgctgcagttcctcggccatttcgttgaacgtgcgggccaactggccgatctcgtcgttgctgttggtcgccacgtggacacggacgctgtaatcgccctccgacatcgcctcggccgcgtcacgcagctgcctcagcggcgcgatcagaccccgtgagaagaaataggtgatgcccagtgcgacgatcatggtcagcggcatggcgatccagccgctccacccgtacttgagcaggaaccagaccagcacgaacgcgatggacgtggcgatgacgatcaggacactcaattccattttcagggacgaaaacagcccgatcggacgatcgaaatccaatcgggcctgtttcctgtcccgcttctgacgcggcttcatcactgttccggcggctcgaaagcgtagccgacgccgtgcacggttcggatggtctcggaaccgagcttatgacgcagcgccttgacatgggagtcgacggtgcgggtgccggatgcatccacccagtcccagacctcttcgagcagcttctcgcgggtgagcaccgacttgggtttgcgcgcgagcgtgaccagcaggtcgaactcggtcggcgtcaggtgcacctgctcgccgttgaccgtgaccagacgctgtgccgggtcgatgaccagcgagccgaagttgaggatcttctcgttctcggagttcttcgcgatgaccttcgcgcgttccacgcggcgcaacagcgccttgcagcgggcgatcagctcgcgcatggagaatggcttggtcatgtaatcgtcggcgcccgcgccgaggccgatgaccttgtccgcctcggcgtcgcgggcggtcaggatgagcaccggcaccgggcggtcggccacgatgcgcttggttgcttcaagaccatccatgaccggcagcatgatgtccatgattaccaggtccgggcgcagctgcttggcggcctgaaccgcgctggcgccgtcggacgccacgcgggcggaccatccctccgcggtgatgcgctgagcgatggcggtggcgagggtcggctcatcctcgaccaccagaatggtccgcggcgtcgtttgacgtgttggagaattaatcatgacgattcacctttcagttttccggtttcaagaataccgcccccaatgccggaatggtgagttttgccgaccaatcacgcgaatggtactcgcccttcaccgcggcgaacgtgccgttgtggatgtcggagccgccgtacttcttgtcgtccgtggtcagcacctcggtccagttgccgccctgcggcagcggaacctgatagtcctgccacgcctcgccggagaagttgaccacgacgacgagctgttcgcccttgctgccgatgcgcaggaagctgagcgtattgtggtcggcgtcatcgctggtcagccactggaatcccgccgggtcgaagtcctggctccagatggccggcgtgtccttgtagaactcgttcaggtcggcgacaagcttctgcacgccgcggtggtcaggccagttgagggcgtcccagtcgaccgaaccgtcatgattccactcgccgtactgcgcgatctcgttgcccatgaaggtgaggttcttgcccgggtgcgcccactggtaggcgaacagggcgcgcacgccggcgtagcgctgccagtcgtcgcccggcatcttgccgaacagcgagcccttgccgtacacgacctcgtcgtggctgatcggcagcacgtaatgctccgaataggcgtacaccatcgagaaggtgatctcgttgtggtgccatttgcggttgatgggggtctcgtgcaggtactgcagcgtgtcgtgcatccagcccatgttccacttgaggccgaatcccagtccgccggcgtcggtcggtgcggtgatgccggggtaggcggtggattcctcggcgatcatcatgacgccggggttgttcttgtacgcggtggcgttggcttccttgaggaagtcgatggcttcgaggttttcgcgacctccgtagatgttcgggcgccactggccgggcttgcggctgtagtccaggtacagcatcgaggacaccgcgtccacgcgcagcgcgtcgatgtggtattcgtcgagccagaagcaggcgttggcgaccaggaagttgcgcacctcgcgcctgccgaagttgaacacgtacgtgccccagtcggggtgctcgccgcgcagcgggtcgggatcctcgtacagcggggtgccgtcgaagcgtccgagcgcgaaatcgtccttcgggaagtgagcgggcacccagtccatgatgacgccgatgccggcacggtggaacttgtccaccaggtacttgaagtcgtccggattgccgagtcgggagtccacggcgtagtagccggtcacctgatatccccacgagcccgagaacgggtgctcggtcagcggcatgaactcgacatgcgtgaagccttccttggccacgtagtccacgagctcgtccgccagctcgcggtagttgccgatgcccttcttccagctgccggcatgaacctcgtagatgctgaccgggccggcgtgcgggtcggtgtgcctgcggtggtccatccatgcctcgtcgttccattcgtggtccgattcgacgacgatggagccggtcgccggcggaatctcgtgggagcgttccatcgggtcggccttcatcttccactcgtggttcgcgttgagcagctcgtacttgtagacctcgcccgccttgacgccagggatgaagatctcccagatgcccgaggaaccgagctcgcgcatggcgtggcggcggccgtcccaggagttgaagttgccgaccacgcggaccgcgtgcgcgttgggcgcccagacggtgaacgaggtgcccacgacctggtggccgggagcaccgtcggcgccgcccatcgggtcgtcgtagcggcgaacgcgcgcgcccagggcctcccacaggcgttcgtggcggccttccccgaacaggtaggcgtccatgtcgccgatggagggcaggtaacggtacgggtcgtcctccatgacggacttgccgccctcgtaggtggtgcatacacggtagtcgggcacggcccagccgtccgcggtcttttcggccgcgatgacggccacgaagacgccgttgaattcgtgccgggcctcggccgttcccttctgggtgtatatggtgacgctcttggccagtggcctgagcactcggatggtgacggttccggcgtggtctccggaaccgaggtgaccgcccagcacttcgtgcgggttgtagaacgttgcattgctcaccgcgctcaaatcactttgattcactggcacgggagcgatatcttcattgatgttcgtgtaagtagccataacacagagggtaataccttcggggcactattgcgagattttggcgagtcgtgtccggagtgttcccatcgtcccggctgtatggcacaatacgtaaggttaagtatattgttgtcacggaggattcatggggtacaaggtcggcgatatggtcgtctatccgcgtcatggagcggcaagggtcgaggccattaccgaacgggtggtcaagggcgtgaagcgggaatacttgcaactcaccgtgctgtcttccgacggtctggtcatcaatgttcccgtcgagaacgcgcagaaggtcggagtgcgtgacatcgtcgacgccaatgaggtcgccaaggtcttcgagatcctgcgtacgcccatcgtcgagaaggagatgaactggtcccgccggtacaagctgaacgtcgagaagctggcgaccggtgacgtcaacaagatcgccgaggtcgtccgcgacctcgcccagcgcgacgtggacgagcacggcctgtccgccggcgagaagcggatgctcacccgcgcccgcagcatcctgacctccgagatcgccctgtccgaagaccttgacgaggccgagatccagcgtctgctcgacgtcaacctcggtttctccgagccgaagccgggcgacgagaagcatcacagcgaggcacccgccgagcctgccgaccggaccctggcccgcatcgaatccgaaagcaagaagtcccggcgcaagtagccggcgacgagcatgtccatgaacgctgttccagcgattggtcaagggtttgacgcgcatcgtttcgccgaggatccagcccggcagctatggctcgccgggcttttatgggatggcgtcggtatcgagggggattcggacggcgatgtggccgcccacgccctgatcgatgcgctgttgtccgccgctgggctgggagacatcggcggactgttcggcgtgggagccgatgctccgggagccggcatgcacggctgcgatatgttgcgaagaaccgtcgatgtattgcgatcgcatggaaggatgccatccagcgccagcgtggtcatcatcggcaatcgtccgaagatcgggcgacgccgggaggaagccgagcgcgcactgtcggatgccgtcggatgccgggtgacggtgaccgccacgaccaccgaccatatgggattcaccggccggggcgagggaatcgccgccatcgccaatgcgctggtgatgtaatcgagcggaatcagcgatgacgcagcgacgtcacgcccttggcgatcgcccagaacagcgtcgacaacgtgacgatgatgaagctcgggggagcggggaacatcgcggacagcaccagaccgccccagatcgacaccaggcacagcaccgtcgcgatcaccatcgccttgaacggcgaggcgacgatggcgttcgccgtggcggccggggtgatgaccagcgcaaagatcagcagcgtacccaccgcggggaccgcgatggtgatgacgccggccatgatcgccatgaacgcaacgttcatcagcccgataggcacgcccttggcctgcgccacctgttcgtcgacggagctgaacagcagtggccggtacacgatggccagcacggcgagcaggatcacgtcgaacacggcgaagccaaggatctgatcggtggttatggtcaggatcgagccgaacagaatggactgcatctgctgcgacgcggacgacgagagtcgggcgaagaacagtccgaggccggtggcgaaggcgagcacggtgccggtggcgatctcccgctgcgtggcgcgcttgcccaacgctccgatgaccagcgcgccgcccagcgcaaacactcccatgccgagcgagaccggcagccccaacagcaccgcgccggtggcgccgggcagtccgatatgggccagcgcgtgcgcggcgaacgtcgaatggcgtgcgatggtgaaatatcccatcacgcccgcggcgagcgagatgcacaggcccgcgaggaaggcgttggtcatgaacggggcggacagggtgtacatccagtcgggatcgaaggagaaactgatgccggtcattgtgcccgccctttccgctcgtggtattcgtgatgatggaattgtgcgacctcgctggtgtcatgcgtgtcgggaacgacgtcatccgcctcgtcgggggtgggggtgacgaacatgtccccctgcggcgtggtgacgacctgcactttggtgccgtacaggtgcgtgagcagcttggaatccagcacgtcgttcatcgccgcgtagtgaggatgcccgtccagcagatagacggcgccggtcaggatcggcagcagcatattgagatcgtgcgcgacgacctggatcgtcatgccgagctccttgttgagccgtgccagcacatgcaccacggcacgctggctggccaggtcgagattcgcgagcggctcgtcgagcatgagcagtttcgggtcgcataccaaggcctgcgcgatggcgacgcgctggcgcagaccgcccgaaagctcggacagtcggtagtgggccttgtcggcgatgccggtgaaggtcatggcctccttcaccttcgcgcgttgcgccttggtgacgaagtggacgccgaaacgggtgccggtcaggccgagcagcaccgactgctcggcggtgagattggagtcgatgtccgaagtgtagctttgcggcacgtacccgatctggcggttcatctcgcctgccgggcgtccgagcacgtgcacggtgcccccggcgagtgggaggaggccgagctccgttttcatcatcgtggttttgccggtgccgttcgtgccgactatggcggtgaccgaacccgccggtatggagaagtcgccgtgttgccagatcagccgttcgccgcgtttcaccgaggcgttgctgaacacgatgcagtcgggccgttgttcccggtcgccgctgttgctgtgcatatgattcatcgtcctgtctgtacgggaccggcatcacgtccgccggtgcgacatgtacggcaacgcattatcgcaaaggactatgacaatcattctcattagcggtggcggactcattagcggcggaggagacggcaatggtaacggtctggagcgggcgggcgaactcagttgctgctgccggcgccggtatcgcttttgtcgtcagcacggttgccggcatcgttcttggcgctggcgccgtctttgccgtcggaactgccgctttcgtcgctgtcgtcgatgatggcgcgggagacggtcttgtcaagccgggccaccagatcggcgatccaatcagtcagcgtcgtgtacgcctgcggcatctgctcactgacgtcgaacacggggacgccggcccgtccggccgtccctgtcagcatgttggtggcgtcgctggattcctgcgtgttgttgaccagcacgctgatgccttgtgattcgatcagcgactggaattcctgcaggtcggccggggcaggttcgccgcccgaggccgcggatcgggcgaaccccttgggagtgtcgtcctggaagcccatgtccgacatcaggtagtacgccacggcctccgtcgcaccgtacgtggcgttcttgcggttggcggcgaactcgcccatcgacttctcgatggccttttcctccttttgccatgccttgaggcgcgactggaacgccttcttcttggcggggagcgccttggaaaatgcctccgtcagttcggtcgccatgccgttgcgggcgtccttggagaaccataggtgggggttgtcgccttccatagctccgaccgtctcggcggccgagacgatggtcgagttgcggcctacggacttggtcgcccatgagtcgtatccggcaccgttcgacacgatgatctgcgctttctgcagcttggcgacatcggatgttttcggttcgaaatcatgcgcgtccacattcgtggagctgaggatggaggtgacgttcacgtcggtgccgccgatctgctcggcgagggagccccactggttgatggacgcgacgacggtgatcggtccggtcggctccttcgcggagggccgctcggattgcgagccgccgccggtgccgcaggcgctcgacgccatcagcatgcctgtggcgaggatggcggcaatgccggtgaccagacgatgcgggtgaatgttcatatcgctgccttcttcgaatatgccgtcgacggtccgccgtcggattgtcattgacctgagtccacgatagcctaacgctacgaggaatgaacgaactctagggaaggacgcacatgaccatcaaactcgatggcaagcgggtcgcggccgaggtcaaggcgaacctggcggaacgtgtttcaacactgaaggagcacggcatcgtccccggtctgggaacgttgctggtcggggaggatcccggttcgatgaaatacgtcgcgggcaagcatgccgactgtgcggaggtcggcatccgttccatccggcgcgaccttcccgccgacgcgagtttcgatgacatcgccgctgcggtgcgcgacctgaacgaggatccggcctgcaccggctacatcgtgcagctgccgctgccgcgcggcgtcgacgagaacgcgatcatcggcctgatcgatccctcgaaggatgccgatggtatgcacccatacaatctcggcgaactcgtgctgcatgtgcagggcgacatcacgaccccgctgccgtgcacgccgcgcggcgtcatcgaactgctcgacgcctacgacatcgacctgaacggcaaggaggtgtgcgtgctcgggcgcggcatcaccatcggccgcacgatcggtctgctgctgacgcgcaaggcggtcaacgccacggtcaccctgtgccacaccggcacgcgcgacatcgccgaccacatgcgtcgcgccgatgtcatcgtcgcggccatggggtcagccgggttcgtcaagcccgaaaacgtcaaggacggcgccgtgctgatggacgtcggcgtctcccgcgtgtttgatgagcagactggccgtttccgcatcaggggagacgtcgacaaggcctgttatgacaaggtttccgcatactctccaaaccccggcggcgtcggtccgatgacccgcgccatgctgctcgccaacgtcgtggagatggccgagaggaaaatgtagccgaattcgggcgtgtcgcgctggtttttccgcccattttgggcatggctgtaggtatcctgataacttgtgtgtgctcatatgagtgcacacgtataactgaatatcgagtaattattcatccactattagaaaccatatatttacatggcagagaacaacactgaagtcaccaaggtcgccatcaacgacattggcaccgaagaggacttcatcaaggcagtcgattccaccatcaagaacttcgacgatggtgatctggtcgaaggtaccgtcgtcaagatcgatcacgacgaggtcctcctggatatcggctacaagaccgagggcgtcatcccctcccgcgaactttccatcaagaaggacgtcgatcctgacgaggtcgtcgaggtcggcgacaccatcgaggcccttgtcgtcaccaaggaagacaaggaaggtcgtctgatcctgtccaagaagcgtgcccagtacgagcgcgcctggggcgacatcgagaagatcaaggaagctgacggcgtcgtcgagggcaccgtcatcgaagccgtcaagggcggcctcatcgtcgacatcggtctgcgtggcttcctgcctgcctccctcgtcgaaatgcgtcgcgttcgcgacctctccccgtacatcggccagaagatcaaggccaagatcctggagctcgacaagaaccgcaacaacgtggtcctgtcccgccgccagtacctggaggagactcagtccgaagtgcgcgagaccttcctgtcccagctcaagaagggccagatccgcgagggtgtcgtgtcctccatcgtcaacttcggcgcgttcgtcgatctgggcggtgtcgacggcctgatccacgtctccgagctgtcctggaagcacatcgaccatccgtccgaggtcgtcaaggtcggcgacaaggtcaccgtcgaggtgctcgacgtcgatctcgaccgtgagcgcatctccctgtccctcaaggcgacccaggaggatccgtggcagcgcttcgctcgcacccacgttcccggccagatcgtcaagggcaaggtcaccaagatcgtccagttcggtgtcttcatctccgtcgaggatggcatcgagggcctggtgcacatctccgagctggcgaaccgccacgtggagaacccggagaccgtcgtcaagtccggcgaagaggtcttcgtcaaggtgattgacgtcgatctcgatcggcgccgcatctccctgtccctcaagcaggccaacgactccgtcgacccggcttccgaggacttcgatccggctctgtacggcatgccggcagagtacgacgagcagggcaactacaagtaccccgaaggcttcgacccgaacaccaacgagtggatcgccggttacgagaagcagcgcgaggaatgggaatcccagtacgccgccgcccacgaactgtgggaggagcacaaggcgttcgtcgccaaggagctggagaacgccgcggcttccgctgccgaggatggccaggctccgaaggaagagaaggtcgaggagacctccaactactcttccgacaactcctccacgggtactctcgccgactccgaccagctcgccgctctgcgcgatcagctgctcggcaagtgagtcatcacatcccgagaagaagtagaatgccggtagaatttgccggcagataggaaaacgggaatcgccccacacgggtggttcccgtttttcatatcccgctcccgccggcgggagcggtcgagcatagcgagactgagggtggtctttgcgcgatgccggtcatcctcacttcccggctgccctgaacaaccgcgacacgcccggatatccagcaagcctgccatgcgcgaatcagtgaaatggcggaatgctgcgagagtccaaaaaatcgccttccatctctgccacgaaaccgggcgtgtcgcgaatagcatgatgacatgagtattcgtatcggactgaccggaggcatcgccgcgggcaagagcaccgtcgccgcccggatgcgggaactcggcgcgctggtcatcgactatgacggacttgcgcatgagatcgtggcgcccgggggagtggcgttgccacggatcgccgccgtgttcggcccggacgcgctgctggccgacggatcgctcaatcgggcgtggctcgccgagcgtgtgttcggccgtgacgccgctcccggcgcacgcgaacggttggacgacatcgagcatcctctgatatatgccgaagccgcacggctggagcgacggaatcccggcgcgaaggtcatcgtccatgacgtgccgctgctcacagaggtgatccggtcgattccgttccaattcgatcacatcgtcacggtggaggcgccggaacagatgcgcatcaggcgcatggtcgcgacgcgcggcatgactgaacggcaggccgcagaccgtatccgcagccaatcgagcacagccgagcgccgggagcttgccgacatcgtcatcgattccacccgcccgatccccgacatgctggcgcaggtcgatgggctgtatcgccggtggaaggctcactgaatcattcgcccgtgaaaaggtgtgagcccggcagcgccgcaaaacgcacatgaaacccgcccaatccctgtatttccaaggcatgcatgttttgtgtgattgtgctgttttgtgcgttatcctcgcacttttcttattgagaaccgttcgctgaacggatggcggtaagctggaagccatgggattcaacatcgagcgcgccgacaagccattcgtcgtcaaatcaccgtacaagccgtccggcgaccagccgcaggccattgaggagctggccacccgcatcgagaacggcgagaacgacgtggtgctcatgggagccaccggtacgggcaagaccgcgacgaccgcatggctcatcgaacggctgcagcggccgacgctcatcatcgagccgaacaagacactcgccgcgcagctatgcgccgaattccgcgaactcatgcccgacaacgcggtcagctacttcgtcagctactacgactactaccagcccgaggcgtatataccgcagaccgacacgtacatcgagaaggactccaacatcaacgacgatgtggagcggttgcgccatcaggccaccgcgaacctgctcacgcggcgtgactgcgtggtcgtcgccaccgtttcgtgcatctacggcctcggtacgccggaggagtacgccggccgcatgctgttcctccaggaaggccagcagattgaccgcgatcagctgcttcgcaagttcgtcggcatgcagtacaagcgcaacgacatcgcgttcacgcgcggcacgttccgcgtgcgtggcgacaccgtcgagatcataccggtatatgaggagctggctatccgcatcgagttcttcggcgacgagatcgaccgcatctccacgttgcatccgctcaccggtgacgtgatcgaccacgagacctccgtgcacatcttccccgcctcgcattacgtcgccggccccgagcgcatggagcatgcgttgaagaccatcaaggaggagctggaccagcgcgtggccgaactcaagaagcagggcaaggagctggaggcgcagcgcctgaccatgcgcaccacatatgacctggagatgctgacgcaggtcggcgtgtgctcaggcgtggagaactattcgcggcatttcgacaaccgcgcacccggcacgccgccgcacacgctgctcgacttcttcccggatgacttcctgctggtcatcgacgagtcgcatgtcaccgtgccgcagatcggcgcgatgtacgagggagacgcgtcccgcaagcgcacgctggtcgaacatgggttccgtctgccgtccgcgatggacaaccgcccgctcaaatggccggagttcctggaccgcgtcgggcagaccgtatacctgtcggcgacgcccggcgactatgagctcggtctgtcggacggcgtggtcgagcagatcatccgaccgaccggtctggtcgacccgaagatcgacgtgcgcccgaccaaggggcagatcgacgacctgctcgccgagatcaaggaccgcgtcgacaaaaacgagcgcacgctggtgacgacactgaccaagaagatggccgaggatctgaccgactacctgctggaacgcggcatcaaggtcgaatacctgcattccgacgtcgacacgctgcggcgcgtcgaactgctgcgcgaactgcgcgaaggcaagatcgacgtcatcgtaggcatcaacctgctgcgagagggactggacctgcccgaggtatcgctggtggccatcctcgacgccgacaaggaggggttcctgcgctcgtaccgctcgctgatccagaccatcggtcgcgcggcccgcaacgtatcgggcacggtcatcatgtacgccgacgagactaccgacgcgatgcgcaaggccatcgacgagaccgaccgtcgccgtgtgcggcagatcgcctacaacaaggagcacggcatcgacccgaagccgctcatcaagaagatcagcgacgtcaacgacatgctcgccaaggaggacgtggacacggccacgctgctcgaaggcggctaccgcaacgcgggcaaggccggcaacacccatctgggtgtgccctccctcgacgccgcggaggccgacaagcgacatgaggagatactcaaggcggggcttcccgcacaggatctcgccgaccttatccgtcagctgagcgagcagatgcacaccgccgccgaacagctccagttcgagctcgcagcacgcctgcgcgacgagatccgcgacctcaagaaggaactgcgccagatgacggaagcgaacaagtgagcatttcgtaacagagagcgtcacagccctttcctatgctggtatacatgtctgaaacccctgtcgcttttatgatcgccacctttgcggtgctgatcgcgtttttcgttgtggatctgttcgtcatcggccgcaagccgcatgtgcccagcaccaaggagtgcgtgcagcacatcgcctttttcgtggtcatggcgctgattttcggcggactggtatggtgcttttccggttcgaagcccgcgatcgaattctattcgggatggctcaccgagtactcgctgagcatcgacaacctgttcgtcttcgtcatcatcatgtcgaacttcgccgtgccgaaagtgctccagaagtacgtgctgtccgtcggcatcaccgtcgcgctgattctgcgcggctgcttcatcctggtcggcgcggccattattcagcggttcacgtgggtgttcttcctgttcggcgccttcctgatctatacggcgatcaagctggtcgtcggaggcgatgatgatgaggaataccatgagaacggcctgatccgcatgctgcgcaaggtgattcgcatcaccgacgattatgacggcgagaagctgcgcaccgagaaggacggcaagtcgtactggactccgatgctgatcgtgttcctgaccatcggcacgacggacgtcatgttcgcgtttgattccattcccgcgatcttcggcctgacgaaggatccgttcatcgtcttcacgtcgaacgtgttcgctctgctgggcctgcagcagctgtacttcctgctgggcgcactgctcgacaagctcgtctacctgccggtcgggctcgcgttcgtgctcggcttcatcggcatcaaactggtgatggaggcgctgagcggcaatacgctgccgttcatcaacggcggtcacccggtctcttgggtgcccgaggtaccgacgtgggtgtcgctggtcgtgatcgtcgtcgccatcggatcgtcggccatcgcgagcgtcatgaagatgaagtcggtcgaggccgcgaagagcgaagcctgagccgcccaaaaaaatgtgagcgctcacaacacgcccgtgaaaacagtggctcacgtcgcccaaacctagtacacttgcctgtggcagtggaagtcgcaagacttcttcctagaagaaatcacataagaataggtaggcattcatgcgtaaagccaagatcgtagacaccatcggtccttccaccgagtctcccgaaggcatcaccaagctggttgaggccggtatggacgtggcccgtctgaaccgttcccacggcactccggaggatcacctcaaggtctacaacaacgtgcgcgcggcctccaaggcgaccggtcgtaacgtcgccgccatggtcgatctccagggcccgaagatccgctgcggctggttcaagaagaacgccgagggcgaggacaaggtccagcttgaggaaggccaggagttcatcatcaccaccgacgatgtcgaaggcgacgagcacatcacctccaccaccttcaagggcctgcccggcgactgccaccccggcgacccgatcctgatcgacgacggcaaggtccgtctggaggtcaccaaggtcgagggcaacaacgtgcacaccaaggtcgtcgttgccggcccggtctcctcccacaagggcatcaacctgcccggcgtggccgtgagcctgcccgccctgaccgagaaggatgaggccgatctgcgttgggccatccgcaccggcgccgacatcatcgccatgtccttcgtgcgtttcgccaccgacatcgaccgcgcccacgagatcatggacgaggaaggccgtcgtatcccgatcgtcgccaagatcgagaagccgcaggctctggagaaccttgaggacatcgtcaagacgttcgacggcgtcatggccgcccgtggcgacatggccgtcgagtgcccgctggaagaggtcccgctggccaccaagcgcatcatcgagctggcccgtcagtacgccaagcccgtcatcgtcgccaccgaggtcctgggctccatggtccactccccggttccgtcccgtgcagaggcttccgactgcgccaacgccgtgcttgacggcgccgacgccacgatgacctccaacgagaccgccgtcggcgagtacccgaccgagaccgtcgccacgatgagccgcatctccggcttcgccaccgagcacggcttcgaccgcatccccgagctgaagaacctcgacatgtcctccaccggcgccgtttcctccgccgccgtcgacctggccgagaagctcaacgccaaggccatcgtcgcctacacccagaccggcaacaccgtgcaccgtgtgtcccgcgagcgtccggccgcaccgatctacggcctgaccaccaacgagcacacctaccactggctggccctctcctggggcaccgaggccttcctgctcgatgaggactaccacgacaagacccgcaaggatctcatgaccttcaccgacaaggtcctcaagaacgccggcaaggtctccgacggcgacaagatcgtcgtgctgagctccgctcagggcgagcacgccgctggcagcaccgacaccatctacgtgcacaccgtcggtgccaacgactgatttcagccgatagcagattcggtttccgctgcgtgacgacggaagccgaatactcatgcgtgggcccccgctccgaaacgagcgggggcccacgcgctttcgccagggaatcgcatcggctcaaggacgatgcggaaggtcgtcgcgcgggtgcggggcagatgcgccgactgtctcgtgcggaaggcgaaccgcacaatctcacatgccgatgtgctccagtagtccctcatggaggcgaaggatcgcgataatcgtcttcgcatcaacgatggtgccgttggtcaccatctccatggcctcctgttgcgtgtacaggcgtaccgcggaacgtggcgtctccgggccgatcgcggaacggtccacctccttgagtcccgtcgccagatacagcgcggtgtactgcgaggagaagctgggcgtgttgatgaagcgcgtgaactgggtgagcttcgaagcctcgtagccggcctcctcgcgcaacttgcggcttgcaacgtccagatactgctcgcttggcgcgttggcatggcctgccggaatctccaacgtccagcgatgggtcgggatgcggtactgctcgacgaacggaatcttcccgtcagcggtcaccgcaaggacaccgacggtgtccccgttgttctcatgcaggatgaaccgttcgaactggccgacctgcgccgaactgaacgcgaccctgtccacgttgaaataatgggtctcgacgatttgcttgcgggactcctccttgaccggtgtcggacgccacggatcgaagggtctgtaagtgtcactgtccatgctcataagcctcacctttgatagttctcttatgtgtttccattgtaggtccgcgctggtgagttgcggggatattcggcgcggcgttgatgctaccggcgtaaatcgcgtgtcggggcgtatggtgtccacggaaccggcgtgactcgctggaatgatgcgcggcacgcctgcaatggacgaatgacgtagcgatatgctagactatcgcgagtgtcagaaacgccctcgtatcccaattggtagaggaagcagcctcaaaatctgcgcagtgtgggttcgagtcccaccgagggcacgttgcattatcgggtgagccacagtgtcgcatcgccgaatctctatgttatcgttatacgtgaagttttgtcgatgaatcactgtgtcgtggaaaagaggttgtgagcatggtggcaaggaagaagacctcaacgcaagagcaagagggtcaggtagaggaggtgctttccgccgatgagctgaaggcagtctccgaaggcgagcccgtcgagagcgccgtgcacaagaagcgcacggtcgttgtcgccgaggacgagtcggtgaaccgcatggatttggtggccatgctggaggacaacgggtatgaggtcgtcggcgaggcggccaatggtgaggaggccgtcgatttgacgcgcaagttccgcccggatatcgtgtgcatggacgtgaagatgccccgtatggacggcatcgccgccgccggcgtcatctgcgacgagaacatcgctcccgtggtgatgctcaccgcgttctcgcagcccgacctggtccgtcaggcgaccggtgcgggtgccatggcctatgtcaccaagccgtatgaggaatccaagctgctgcccgccctggaagtcgcgatgggccgtttctccgagatcaacgacctgctcgacaacgtcgagaccagcgagaacaagctcaaggagaccgaagagcagctcaagaaggccgaggagaaactcaagaaggccgaagacacgctggaggagcgcaagctcgtcgaccgcgccaagggcctgctcatggacaaggcggacttctccgagcagggagccttccgctggatccagaagacctcgatggatcagcgcatcccgaagaagcgtctggccatggcgatcatcgccaagtatggcgatcccaagccgtcggaagtaggggaatgagcgaatcgcgcgacgacgcccagacgaaaacgcgtggaacgttgctggtggtcgatggccactcgcttgcgttccgcgcgtttttcgctttaccggcggaaaatttcagtactcaggccggacaggccacgaacgcggtatggggtttcgccacgatgctgtcccaggtgctggacagcgagaagcccgaccatctcgcggtcgcgttcgacatgaagggcggcaccttccgcaacgagatgctgccgcaatacaagggcacccgcgaagcggcgccggaggacctgctcacccagctgccgctcatccagaagatgctcacggcgctgggcgtcacctacgtcgaaaagcaggggtatgagggcgacgacatcatcgccacgctcgccgcgatgggggagcggtccggatacgacacgctggtgctgtccggcgaccgcgacgccttccagctgatcgacgagcgcgtcaccgtgctgtatcccgggcatcacttcaaggacctcaagcacatgacgccgcaggcggtggaggacaagtaccatgtcggccccgcgcaatacccggatcttgcggcgttgcgcggcgagactgccgacaacatccccggcgtgcccggcgtcggcgacgggttcgcggcgaagtggatcaaccagtacggcggacttgagggtatcatcgagcacgccgacgagataggcggcaagaagggcgagtcgctgcgcgagaacatcgagcaggtcaagctcaaccgcaaggtcaacgctctgcggcgcgacgtggacctcggtatcggcatcgaggacctgacattcggcgaggtggacgccgacgcgctttcggaactgttcaccagcctcgaattcggcccgcgcacccgcagcaaggtgctcaagtcgttcaacgccggcaagcaggccggcgacgcagctgacaagcacacagacgacgaggacacctccgacgacctgaggattcccgaggccgtgaccatcgcggatgaggcggcgttggcggcatggatcgactccgcacgagacggtctcggctcgcctgccgacaattcggatgatgagccgcgcaaccgggcgcactgcgccgacgtcatggcatcgacctgcgcgctgtatgccgaaggctcatccaaacccgggaacccgggatgcagcgtgctgatgctggaggtcggcggcaaggcggccgtgctggaagccggcgtgatcgccggcgtccgtcccgcgttgcagcggttccttgacgggcacgccgaccggatggtcgtgcacgggtacaaggagcagtcgcacatcctcgcgtcgctcggactggacctcgccgagccgtggttcgatacgaaactcgccggatacctggtccagccggactatcatgccgattcgctggaacaggcggcatcccatttcctgcagctgcaattggacaatgccgatgacgtcgcgcaggggcagctggacttgagcggcgacgtcgatccggccgaccagcgcaaggatctgcttcatatggccatggttcgcgccctcgccgacatgctggccgcgaagatcgacgaacgcgagcagttcaggctgctgcagtccatcgagctgccggtgtcccacgtgctgttcggcatggagcaggtcggtgccagcgtggacttcatgcgcctgaccgagatgcgcgaccggttcgccgtcgacgctcgcgacgcgcaggagaccgcctggcagttcgccgggagccgcgtcaacctgcaaagccccaagcagttgcaggccgtgctgttcgacgacatgggcctcaagccgaccaagaaaacaaaatcgggttcgtacacgaccaatgcgtccgcgctgcaggatctcgcggtccgatccgtcggcaacgagcgcgccaacggattcctgaccgcgctgctgcgccatcgcgagacgaacaagctcaagcagatcgtccaaagcctgatcgatgcggtgaaccctgatgacgggagaatccacaccacgttcgagcagaccgtggccgccaccggacggctcagttccgtcgacccgaacctgcagaacatccccaaccgcaatgccgagggccgcgagattcgctccgcgttcgtgcccggagagggctacgagtcgctgttgagctccgactactcgcaggtcgagctgcgcatcatggccgacctgtcgggcgatgacgcgctgatcgaggcgttccgctccggagctgacttccacaagtacgtggcgagcctcgtgtacggcatccccgttgacgacatcacccccgaccagcgcacccacgtaaaggcgatgagctacgggctggcgtacggattgagcacctacggtctcgcccagcagctcaaaatcagccccggcgaggctgaccggctgaaatcgcagtatttcgcgacgttcggcaaggtccacgagtatctggaatccctggtcgccgatgcccgcgagaagggctacaccgagacgatgttcggcaggcgtcggtacttccccggactgcagtcgccgaaccgcaacatacgcgacgccgccgagcggggagcactcaacgcgcccatccagggctcggccgcggacatcatgaagatcgccatgatccacgcgtccgacgcgctcgccaaggccaaggtccgtagccgtatcatcctgcagatccacgacgaactcgtggtggagatagcccccggcgaagccgagcaggtgacgggcctggtgcgcgacgccatggagcacgcggtcgatctcgccgtgccgttggacgtgtccaccggcatcggctccgactggcagctcgccgcccactgacggcgacggcacggcggcgagaacaacgacggcaagaaaagaaaagaggacaagccatgaccacgcttcgacaggtcgtcaacgtagtggaaaccctgtatccgctgcgctatgcggaatcctgggacgcgcccggcctgatcgtcggcgagcccggtgccgacgtcggactggtcgcattcgccgcggaccccaccatggcggtgatcgacgaggccatcgaacgcggcgccgacctgctgatatgccatcacccgctgctgttccgttccgtgcacgctgtctccggacaggacgtgcacggtgccatcgtcggcaaactgtacagccatcactgcgctctgtgggtgggtcacaccaacgccgatgccgcgtggcgcggtgtagggcaggctgcggccgacgcgttcggcctggtcgatcagcggcctctggtgcccatcgacgactcggggtctgcgcacgccgtgggcctgggtcgtgtcggcctgctggaggagccgatgaccttggagcgtttcgcgcatcgcgtggcgcaggcgctgccggccacgaatcttggtattcaagtcgccggcgacctccagtcgctcgtgcggcgcgtcgcggtgctgccgggatcgggggactcgctgttcgacgaggtgcgggccagcggagccgatgtgtatgtgaccagcgacctgcgccatcatccggcgactgacgccttggaacaggcgcggtacgaggcgtcgctgctctcgcgcggactggccgccccctcggccggaaatacgggaacggcagggagcgccgtcgcccgtccggcgctgatcaacacgccgcactccgccatcgagtcgctgtggttccgatacgccccggacgacatcgccgcggcggtcgggcgggcgacgggggagaccatacgcaccacccatatcacgatgaacaccgatccgtggacgctgagtatcccctgccggagctagccggctgccgctgcacatcgctgacaacttctttcgaaaaaggaccattcatcatgcctgaccgttcaaccgctgacaccgctggcactgccgaaaccgcgggtaccgccgccgcaagcgacatcacccggcaggtcgacgcgctgctcgaccgctccaccgacggcatcgtcatggacagccgggatcgcagggccgtcgtgctgtcacgacagaccgtgtaccaaggggcggtgttcgacgtggaggacatgcgcatcgcgctgccggccggtggcggggactgcgtcaccgtgcgtcgccaggtgtgccgtcacgcgccatgcgtcgtcatgctcgtccatgacgaggcccgggacctgtacctgctggagcgcgagtaccgcgtaggctccgacctgttcgcctacggtctgccggcgggactgatggacgacggagaggacgtggagcaggcggcgctgcgcgagctcgccgaggagaccggcgtggtgccggtcggagaggacggcgtcatattcgaccatgtgggggcgttctactcgtcggaaggcatgagcgacgagctcgccaacatcatggtcatgcacctgcgacgctgggaaagccgaccgcgccggttcgatcccgacgaacacgtggaatctgcgtgggtgacctggcgccaactcgccggagtgccggtcaccgcgtcgaactccgtcatcgccatacagcatgagaagattcagcgaattctgaaaaaacaataagcattcatagtaaaacaaacatagtttgctgagaatttttctttatatcggtttgaagttaactatgttcacgttggcgtgcgataatatgaccatgcagcaaatacgacccggctccatgtacccgttgggtgcgaactacgacggttctggcgtgaatttcgccttgttctcgcaggtggcggacaaggtcgagttatgtctgttcgacgaggacgacaaagagacgcgcatcgagatgaccgagcagaactcgtacgtctggcataactatatttccggaatccaacccgggcaacgctacggttaccgcgtgtacggcccgtacgatcccgccaagggcatgcggtgcaacccgaacaagctgctgctcgacccctacgccaaagccatcgaaggcaatatcgacggcgacgaaagcctgttctcctaccgtttcgccgacccggacggcccaatgaacgacctcgactcagccgatcacaccatgaagtccgcagtcgtcaacccctattttgactggggcaacgaccagcatccgaacacgccataccatgattcggtcatctacgaagcccacgtgcgcggcatgaccaacctcaacaaggacgtgccgccacagattcgcggaacctacgccggcctcgcgcacccctcggtgatcgaatacctgaaaaagctcggcatcaccgcactggagctcatgcccatccaccagttcgtcaacgactcgttcctgcaggaaaagggactgagcaactactggggatacaacaccatcgggttcttcgcgccgcacaacgcctacgcatgctcaggccagcgcggcgagcaggtcaacgagttcaaggcgatggtcaaggcataccaccgcgctggcatcgagatcatcctcgacgtggtttacaaccacaccgccgaaggcaacgacatgggcccgaccctgagcttcaggggcatcgacaaccagtcgtactatcgtctggtagatggcgatccgcggcattacttcgacaccaccggcaccggcaactcgctgctcatgcgctctccccacgcgctgcagctcatcaccgactcgctgcgttattgggtcaccgaaatgcacgtcgacggcttccgctttgatctggccgccacgctggcacgccagttccaggaggtcgacaagctgtccgcattcttcgacatcgtcgaacaggatccggtcatctcacgtgtcaaactcatcgccgaaccgtgggatctcggctccggcggctaccaggtgggcgggttcccgtcgagctggtccgaatggaacggccgttaccgcgactgcgtgcgcgacttctggcgctcgcagccgtccacgcttcccgagttcgccagccgtctgctcggcagctcagacctgtatcaggtcaacggccgcaggccggtcgcttcggtgaacttcatcaccgcgcacgacggcttcaccatgaacgatctggtcacgtacaacaacaagcacaacatggccaacggcgaagacaaccgcgacggcgaaagcaacaatcgttcatggaactgcggcgtggaaggccccacaaccattagcgatgtcaacaacctgcgccagcggcagctgcgcaacctgttctccacgctgctggtcagccagggcatcccgatgatctgcggcggcgacgaggtggaacgcacccagcagggcaacaacaatgcctactgccaggacaacgagatatcgtggcgcagctgggactccacgcccgagcaggaggacctgctgcagttcgtgtccaagctgatccatctgcggctggagcatcccgtgctgcacaggcgccgcttcttctccggacgtgagccgggcgaggacgtctcgacgatcccgcagatcgaatggttcgaccacaccggatcaatcatggacatggatgactggtcgaacacgcacgcgttctcgatgatggtgttcctcaacggctcgcgcatccccgagactgactggtacggttcgccgatgatcgacaacgatttcatcctgatcttcaacgcgcattacgagccgatcatgttcactctgcccagtgagcggtatggcaagaagtggcaactgctcatcgacacatacaaccccaaggggccggagctgagctatgaggcgggattcgccatcaccgcccaggcgcgcagcttcctgctgctcaagagttctgattgcccggcggtacgtcgcgaggacagctgagatatcgtggcaggtgcttcgcacctgcgcgctgtgtgcgctacgctgggcaggcgccgaccggtgacttgcgtgttaccggtcgttcgacaggcgggattgcagttccgcgacctgctcgttggtgccggagccgtccgcgtctcgggctggattgccggggccggcaccggtgctgttaccagtgccgggctgcagcatcatcagctgatcgtgcagacgatcggcctcgattgcggcgatttgccttgagaagacgatgaaccatcccagaaacagcagtccggcgagcgcttcgagattggtgagcgtttcctggcccatcagcatcctgatgccgatggcagagcagatcagaatcgccaaggcggaaatcaccgacatcaccttcggtatccgcggggcgagccacggcagggagagcatcaacacgcccatgatgaccgtcagtcccttggcgcacacgttgtgcatgatcgggtgcggcgtatagcggaacgcgccgatgcctatgaacatgagcccggatatggtcagcagcagcgacaggatggcgatacgcaacgtgaaatgcgtgatgtcgcggtcatcggcggcggtgccggtgcttttgttcatctgatggcgtgctcgctgtatgcgttcggtggtgatcagctccgagatggcgaagtagctgacgatgatgatgcacgttccggcgagcatcagcgtcgagttgaacatgcgggccgcgaacgtggtgcggtcgccgagctgcgagaaattgttgtggtaccagtacgggtcgtcggtggtcaggccggcggtgcacacgccggaaatcacgaagaacggcagcagcgaggccaacgtcttcgcgttcatcatctccgcctgcacgaacgtcatataaccgacgacgcccgcgaagccggcgcagatgggggtgaggtatccgctgaacgtcgccgaccccatcatgccgttgattgcgccgagtagggcgaatgacgagaggaacacggtcgccgcgtacacgatcgacaatgcgaggatctcgaacacgcgacgaatcggggcgaaccagccgcgatgcaggttgagcgaatgggagtggctggcgtaaccgacgcagaatgacagggcggcgcaaccggccagaatgcccgcgcacaccatgaaacgtcgttgggtgatctgccagatcgccggggcgaactgcatgtacagcgacatcattatcgcgccgaccatcgcgcagatcaggaatgagatcagaccaagggtctccgctcgctgatgacgtcccatgacacccctttcgccgtccggatatccattgtactcgtgcggtctcgcggctgtgttgggtggattctagtggtggttgcaacgcctgattggttttgttggttgttaggttagcttgcggtgttgagtagttcgatgatcttctcgctgggcttcatgaacccgagggttttgcgtggccggtcgttgagttcctcggcgaccgcgtcgaggtagtcctccgggtagacggataggtcggtgcctttggggaagtactggcgcaacaggccgttggtgttctcgttggtaccgcgctgccacggggagtgcgggtcgcagaagtagacggccatgtccagtgccgtggtgatccgtttgtgcagggcgagctcgcttccctggtcccaggtcaggctgttgcgcaggagtttgggcaggtgctgcatcttgtcgatgatggcctgctagacgtgttcggcgtcgtgcccgtcgggcaggcgcagcaggatcgtgaacctggtggtgcgctcgacgagcgtgccgatggcgctttggttcttggcgccggtgatcaggtcgccctcccagtgtccgggcacggcgcggtcctctatctcggccggccgttcgctgatcatgaccatgggctcgcggaaccggggtctgcgcccgccgtcgccctgtggcttgcgcttggcccggccttgcctcatggcgcgtttcagctcctgtttgagttcgcccctggcctgcaggtagatggcctggtagatcgtctcgacgctcgcgtgcatatccccattatccgggaagtccagcctcagccggttggctatctgctccgggctccaatgcctgcgcaacccggcggcgatctcgtcccacagtcgcgtgcccacggccgccttgcgcggtctggggcgtttgagccggtccgcagccttctgctgggcgcggtagggctcgcagccgccggactcgggattcctgttgcgctcgacctcgcggctgaccgtgccggggtcgcggcccagcagccgggcgatggcgcggatcgaatcgcccagacgcagacggtccgcgatggcgatcctctcgtcctggctcagatagcgcgcatggatcctctttggtttgtccatggtggaacgataccagtccaccaggggtttctcgttccttcccgtggcgcgcgtcctgccgttgcgccacgccttgccggcgcgtttcgagacgccgaccgcgtgcgcggcctgggtgaagttcatgccctcctcatccagcaggcgcacgtactcggcgcgtctcgcctcacacatctcgttcctcgtcgggtattcgacgccgttgaacacccaacggcgtgcgtcgcggtccccgtcatgatgatggcttttcatcacctgatcctccttgcggtaggtcaggtgttgcaacgatcactagaacccgccttgcgttggtggccggggaggggggcggtgcgggacgagattgtgacgcgacggtacgggattatgacggggcggcgtgggacgatgaccggcatgcggcgtggtgcctgttcatgcgtgggatgtgtcgtccggattttgcgttcctaagtgcgcgccgaaacgacgaccgtgcgcacataggtacgcaaacagggccatttgcgtacctatgttcgcgcactcgtcgtttcggcgcgcacttaggaacgcaatgggagggagcctacattgcaccgattatttggaccatcggcggggtggaagatgcgggtcgagtccaatggccacggattcggttgccaaggcctacggaacccggcgataattgaaaaacgggctcagtctcagcctatggtatactcaacatttgtgctttgccttgggctgggcacatcgggctgtagcgcagtttggtagcgcgcctgctttgggagcaggatgtcgcaggttcaaatcctgtcagcccgaccacgaaagccctactcccgctttgaaccgcaccccgatggttggactgaagaaattcagattcgatgatcggaggtgcggttctttcgtatgcgtgaggatcggaggagacactacgacgacgggttccggcgcgaggcgctggaacccgtcaaggccggagccggcgggaacacgctcgccagacggcttgccatgccggtgtataccgcgagaaactggatcaggctgtacaggtccggcggtgaggaggcggtcatgggaggcaacggcagcagacgctacgactgggagacgaaggtcgccgcggcgcgcgaccgcgtcgagaacggcatgaccaagacggaggtcatggcgaagtacgcgatcgcgagcatcgcgccgttggaacgatggtgccgcgagtaccgggcgggaggcccggaggcgctcagaccgaggcccaagggcaggcccaaaggctcgaagtccaggccgaagcccgaaccgacgcgcgagcaggagctcgccgaacaggtcgcctacctcaaggcgaaggtcgcgtacctggaaaaactccgggccctgcgggcggacaagtcacgcggcgcgagaaaagcgccgtcgtccgactgctcgcagggcggggacaccggcttgaccagctcctgaggatagcgggactggccagacccacgtacttctatcacctgtcgcatccggagcgtgtgacgcgggccgatctcgagccattggtcggcgagatctggggacgcacgccgaacgggtgcggccaccggcaggtgcgcatgtgcctggtccacgagttcgggcaacgagtgtcggccaagagcgtgctcagggtcatgcggcgcatgggactgagatgcgccatccgctccgggaacccatggaaacgctacgactcgtacaggggcgagacgggcgatcacgtgcataacctgctcagacgcgacttcggcgcggcccgtccgttctccaagctcggcaccgacgtcaccgagttcaaggtcgcgggcggcaaggcgtacctcgctcccgtgtacgacatggccagcaaggagatcgtcgcctgggacgtgagccgcagtccggacctcgggcagcagaagcgcctgctcgccatgctcgcggagcgcctgcccgccggcgcggagccgatcctgcactcggacatgggatggcagtaccagcaccaatggtggcgggacgagctcgaacgcctcggcatccgccagtccatgagccgcaagggcaactgcctggacaacgcggcgaccgagcaggtgttcggccacctgaaggacgagttctaccgcggctgcgagttcgactcgtacgagcggttcaagcacgagctggacgcgtacatcgtgcactggaacaccagacggcgccagatacgactcgagggacgcaccccggaggagttccggagcatgtccctcgcggtctagggctgtatcctaattaacaacgtccaacaaacggggcgcagttcacttgggaagtagggctcttttgttttgtttgaaagccgttttgatggcttgaattgtcattgctggtgcaacgcttgtgagtgatgtgggcccatgggttcccgatacgatggtgtttgcctgcgacaaccgggtatcgggaggtcccatgggccggtacgcccgtcttgccttggccgagcgcgaggaaatcgtgttgctgaggcgcggggggatagctgcggcgggatggccggagcgacgggcggggacaaagcgaccgtcagcagggagatggccggaaactcgttcgccgttggctcggggcggggccatcgtgcatcgaccgcccagcgtggccgcgagtcccgaagggtttcctgcgtgcggcccgggatcctcgacggcgagcgaggggcggggcttgtgcggcgtcttgtcgtgcgggagcatcggtcgcccgggcggatcgcgggcgggatcgcggtcgagcggccgggactgatggtctccgcgtccgcgatccaccgggcgatcaacgagcggcggcttgatccacccggcctgacgcgtacccgccgtggaatcagggcgcgtctgcgtcataaaggcaaacgccggcacgggaggggcgggccggaggaacggcgtggcgagatcccgggcacccgtcccatcgggcagcgtcccgagatcgtggggggaacgttccgggctcggcgaccgggaaggcggcaccgtcgtcggcaaaggcgccggggcgtgcctcgtcacgctcgtgggccgcagaagcggtctgctctccggaggacgctgtgccgcgcatgccagacgcgacgttgccgatgtggggatcggcgtgctccgaaggcatccgggggagccggaccgtgaccctggaccggggtatggggttcgctgacttcgagaaggtcgtacaggccaccggcgcggtgttctgcttcgccctgccccgtcatccatggcggcgtggcggcaacgggaacaccgacgggctgattcgtgagtgtttccccaagggcgccggcttcaccgccgtcggcgagcaggaggtccgggccgtgtacgatgccatcaatcacagaccacgcaaacgccatggataccggacaccctgggaaatccaccattcaacggtgttgcacttgctctgacgattcaagggccgaagaagtttttactggcttttactggaatcgctgaatggttttcttgcgatctcagggtcttccatttgcttcatctcttcaatgatgtcttttacattctggtagcgtttttcgggatcgttcgctgaacacttctgaatgagggagcttagccgagaatcgttgatgaaaagccgctccccgccggtaaagatataactgaggatgaagcctatggcgtatatatcgttgactggggcgaaatccttgaacgaacccagcgcggggtccgttatggatcctttcatcgcagatcctgtacttgtaaggtctgagtttgcctctttggcgaggccgaagtcagagactttaactgtgaatgcgccaccatcccggtatgcgtgaatgagcacattcttatagctgagatcccggtggcatactttatgattatggaggaagttcatcgcatataggaactgcatcgtcatcttgtggcgagcccaatacgtcagcttttgattattgcgcgaaacaaccatcccttgagcggcgcagcaaccaccgggtcaccttggtcacgccgcaacccgacacgggatggataacgggacaatcctaagccgatttcgtcctgcgctacggacatgtcagcggcaccgacgaaaacggcaatcccaacgagtactacttcacctcgggcgacattaaccgccccggcgaagacagagagggagcgaaactcaaccttaaactcgtcggcttcaccgatgccaagcacttcgatcccaacggaatgatcgccctatacgacaagcagaccagcgaactcgccgccggatggtcatacctcaagctactggaacactggcagcgcaagcacaaccgcgccgcttacgtgccgtatctcagggaaaaagaagacgggaagaccacggtagaatttggcccactcgtcaccctcggcatctccaccagcttcggcctgttcctaaaagccttccaagacggcaaggccatctacgaccccggcgacaaaatcaccctcaaagacggcagatggacgccccgttcccgaagccaattccgcatcaacctcaacgacatctcggccatctaccaagaagtaagagaagtggatctgcgaagatcgaccatttagtcgaccatttagcagttggtaagagacgaagtcgttccaatgacagggcggtttgacttccgtcctcgcttaagtggcctcatccgttgcgatatatgggggcagggtggtgggaattctgcactgcgactatgcttaggctatgcttaccactgacgaagttaagaagacagtacgcgtacttgacaggatgtctcacctttccctgttcgaagtcaaccttttgctcacctcggtaggtatggatagcgtaggagttgactttgatgggtccagcatttgggatgaagatgcggagactagaaaaaactatttgcgtggatgtctggaacagaaaaaatattccaatgaaatactccaaaattggaatgagtcattagatgcattatcttcgcttgaaaaagagaaccgtcttgcagaaaatgaatcggaagatttattcatatttgcctcacatttgacaaaagaccatgtgcggataaagaaaatatctgatgccttaaaatggaactggggtattaaactatttgtggcgtatgctgatatacgcattagtgaagactggtcagctgaaattaaaaatgctctttcgagttgtgatgcggggattgcgtttctcaccgatcgagaggcattcaaagctagcacttggtgcgaccaagaaataggatggatgctaggtcgttttgaagacaaagttctggcaatgcgatttaaactaaacggcgtgtaccaagatccctatggacctttgggaggacgtcaagcgcagcctgttgccgaaaatgaatctgaagatcaaattgcagctaaaattgtagactggtgtatgacaagagaatccttgcgaaacaagctgtgtacgtctctcgttaaagcatttgcgaaggcaagggattggtatcagcgtgatgatatataccaacgtttaaaaactttccatacactcaatgagctacaagttcagcttctgctggaaggcatgcataacaacctccaaacttggggaggagaagatcgaacaactccaaagcatcccgaaatgcttgattcattgcttggattcattgttgcacagcctggtttcaaaagcgaatctaatcattctgcattgaagaaagtagccgaagaatacaacttcatagacagcgtaaaaaagattatagatctttggccgacaagcccttgggaaaatctagacgaaattgctttctaagaaaaggaaaagctcttaaaccagaatggccatatagaaatatgattcgctggaatccttgagattccagcgaatcttgggacagtaactccgtatctatatcaattctggtttaacagagccaaaaaaacttatctttcagagactatcaatcagttgtaaactttgaaaggcgtttcgacacgccgaacgccccgaccgccaataaggcctgacttgaatacaatccgttaacaatgaccgtcacagtgaaccaatcccagtcggttcaacaaagacaaccaaaaatgcgaaaccgctattttccaacgatattcggctcagcaaagaccactggtttcaaccaaggaacaccccgcgaaaacaggatgtcgcaggttcaaatcctgtcagcccgatcggcagcccagctcccgcttggggagtgggggagtaaggcttcttgtttgcctggagggccgttgcgtttttggggcttgaaatcgtgttgacggacggttatcgccaccgtggccttcggtgtggtgccggaggctgccttcatcgtctaaggaggattatacggatatcggcaccgtgatcacgctcgggtccaggttcgtggcgttgatcgtgcccgcgttcgttcgggtgcgcaagaagtatattcccggcggatacgtcggactcgtgtccctcgcggcatccatccttgtatttagtcaagtcggtgttttgggtttgctcatggggcgtgccggccgggttggttggttattggggttggtttttgccgaacatgagcgcctcgccgatgcggtggctggggccggtgaattcgatgagccgtccgtggtggacgatgcggccgatgatcgcggcggcgagtttgtcgtcggcgaagaccgtgccccatttgctgaactcgatgttcgtggtgaggatgatgctgcgtctctcgtacgagctggcggtgacttggtagagcaggcgggcaccgtcgatgtcgaagggcacgtagccgaattcgtcgaggatgagcaggtcggctttggagatgtccttgggcaggttgtcggggttgccgtcgcgtttggccttgcccagttggagcacgaggccggcggtgggaagaaacccgacgtccatgcccttgtcgacggcgagcatgcccagcgcggtggccaggtgggtcttgccgcgtccggtctttccatagaagaccaggtcctgggcatgccgggcgaagtcgagggagagcatctcgtccctggtgtagccgtcgggcagcctcacgtcggagaagtcgtagccgtcgaggcctttgggcacggggaacttggcgcgtctcatgagcctggcgcgtttcgcggtctcgcggttgtcgagctcgttctggaagagccggtcggcggcctcggcctgcctgggcgtggcccgtgacaggaagtcgtccatcatggcttgggagatgaacaggcggcgcgccttggcgcgcagtcgcccggggtcggtgcgttgcgtgctcatgcggcctccccgtccgtggcgaacgcccggtcgtattcgcctgggtcgacgggttcgtcgtggtcgacgctcttggtgccggaggcgagcctggcggcggcgagttcgacgctggcccggtcgggtgtgccggtcgtctcgagggtctgcggcatcgcgggcacggcgttggcccagccgctttcgcgatcggcgtgcttgagggtgtgcaggctttccctgagggtggccctgtcctgacggtcgagccattcgcgcaacgggtcgggcaaggcctcgcggacctggctgttgggccatgcgttgggcttgtcgcaaagcgcctcgagccggcgcgggggattgtcgctgctggtgggggcctgaccgtacgcgcgctcatgcacggcgatgcgcctgcccttcgcgtcgaggacctcgacctcgagggcgcggaagccgacgatgacctcacatcccgcgttggccggatcagcgggataccggtgtttccctcgacggtgactctgccgtacttgtcggccctcatgcgttctcacctgaccacgtcgaacggtttcgcaggcaagggaggcaaggccttgcgatccgcgtcgaacaggccggcctccctctcgcccttgaggtaatggtccttgtccgccagttcgaggcacctgccgggcggcctggagctgaacccctcgatgctccagaccgagggtcgcggcacgaacagcttgcgccgcacggcgccgaccccggcctcgacggcgcccttctcgtggcccgaatacgggttgcagaacgcgaacgagaacccatagtgcgcccggaacgcctggaacaggcgggccagacgaacccgctcgaaccgttgcctgcggcccacgcccgcggcgttgtcggacacgatgcgcccgggcacgccgccgagccatccgaacaggtccttgagcgcctggcacgtgcgttccgcgttctcgccgggcatcaactggctcggcgacacgttcgaatacgggaaatcaagcacgagatgatgcatacgttccaacctgccgcgctaatacacgtcgacctcgccgaaatcggcctgggcctcgccgggatgccacaccaggtcgaggtaccccgactcgcgttccgcggcgaactcgcgccgaaggcgggccaccgtcctggtcacggtcgacagcgacacctccgcgcccttctcgtcgcgcagccgctcccgcacgcgcgtcgcggtatgccgctgcttatgccatgtctcgcggtcctcggcgagccactgctcgatcgccggcacgtactcgtcgatcgccgacgcgcgccgcttcctcacgggaggcttgggcgacaggtcgccggcctccagatatttgcgcacggtcggctcgcccgccccgaccttcctggctatcgacgcgatggactcgccgttccttctcaactggcgaatagactgaatcctgggcatgctgatcatttgcctttccggcctccttgaacgataacgaagcaccttcaagataaggaccgcgggtggtctgcatgctccatgcccagacccgaaaaaaataagtgactaaaacctcaaaatcctattgaacataaacagacggggcgcgatggatcgatgagtgtgcgttccgctggtgcccgcaggccgagcgcatcctcgacggctttcacatcgtttcccgggccgccgacgcgctcgacaaggtcagtaccgccgcatggcgcgaggccaggaggtctggcacggcccgcaaaggcgtcggggacccgatcaagggcgcccggtgggcgctgctgaagaacgagtcggacctgaccgccgcccaacgcgcgcagctcgagtgcgtcgcgaacaccaacgagaccctctgggccgcgtacaagctcaaggaacgcctcaggatgatcctcaggcagggggcgcggatgcggccgcgccccctgctgcgccagtgggccgcggacgcatccctgtgcgacatcgcggaattctcaaaactcggagagaagatcgcccggcgccgcttcgacatcctgcgcatccgaaccggactgcccaatgcgaggctcgaggccgtcaataacaaaatcaagaccaccatcaaaatcggctatggctacaggaacctcgacaacctcatcgccctcgtcatgctcaaatgcggccgcttggacctccaactacccggacaccaataaccagtaagccagaccagtgattcacgtccgcacaaacacccgaagagcctttaaatgaaagggttgccaggtagcttgtgcgctatccggcaacccttcatctcatatgatggattccaccgtctgatctatgtatttcttccaagcgggagcttccatgagatctctctgcgcttcgcacacttcaatcagctctttgattttttcgtgtttggcgctttcgttgctctggaacagtgcgataaagcatttctggaattgcgcaagcgtcaaaggcagtatgtctagtcgttgcttgacatcgccttttgcgtaccatacgccgtggcggaaggtctcggctgtgttggtgtcgatcttgactgcgatgaacagtccatacactggaatgtcgtttttcccatacttcagcaccgcttcggatacgtgccgtcttacaggctcgccttccatggattcctggcgggagcctgtggacatagtaacttcagtcagaatggtgaatttatcgtattcgcagtacaggtctccttgtccgccgcctgctgccgatacaggaaggaagtccgagtccaatcggaaacctcgcatatcgctgggatggttgacgaggtttccgaaggcgagcgcggcacgccataatacccattcgagatatgccggagtttcatctttcggtacttcgatgccgttgtcctcatcagcgtcgtcgatcttcttgccgccgcctttgatcaacagtgtcatgtagtcggagatctcctgccactgttctggctgtttggcggcatagttgatttcgtcggttttctgccagagttcttcgagatggaggcgcgttgcattgatctcaggtaccgtcgataccgggcgattcccaagatcgtaatacacatggttcttcttcagctgtgcttccatatcaagaagcaaagccttggcggtctcaagatcatccataggcaaggacgcgccatggcagagctccttgtatacgtccataattgggcgacggctcaatgttgttgaggccagcttttccgctaggaagtgcttggctggaacgatgacaaggcctcgacctttcctttggacgattccactgatgcgaaggtagcgcatgttcatatcgctgtaatcagtgaaattatcgctcttcttgttgtaatcctgaccgcgcttcttgatttcgtcggcgtcgaacctacgcttggctgttgctttcttgcgacgctctcgcagatcgatgatatggtttacgacatcgttaatgtcatagctgggatcggtggtatgaccccatagcgagaattcgattcggctgatttcactggtgcctgtacgcttttcaagttccagcatcaccgccaatatccaccttagcggggagaagaagccgagatctcctggaactttggtctgctcaagactcagcgaacgtaagaagcattcctgctgtgcaggataggcgtcggctttgaggaaggtctcgccgaatggtgtcaccagatcttgggggccgagatcttcctgtttgccgtccttctttttaacttgcgggtaaatgaacccaaaacgggcaaacattaaccgccattttcttgcatagctgctggtgtcttctgcttcgccggtcgaattaaccaagccggcatgattaagcagtgtttggaatcgttcttcgttgcttcctcgcaggttcccattgaacggggactcggcgaacagtttcaggccctcccagatgcgcatcggattgcgtaatccagtgttgcccagttgccagatcgttatcggtttgcccatgacttcagtttacagtcaactcagcatcatgggcattagccttatgattaccagccaaggaagaagtactcttcgaccttgtttctgtttgccgcacctttatgctgggtgccaatggagtatcggtagtcaacgggaacgacttcgacattcttcttatgccgaccaaggatcctcagcatctcttcttttgtcggctgactgttggaagaataggagatgataagaatactatccttgaatcgctcgatcaatttgtcgaatgcgtccgcagctcccgtccgggaagagaacggggtcgggtaggacttgaatttcttggtcttggtatgctcctgcatcgtgacgccttgccagtcgcaggcaagtccctcgacgaaatggtaacgccgtacatattcgttatccgacaatggcgagtagtacggaggatccatgtatacgaggtcgggatggtttgcctcaagtagcaaagcatcgccgcggatggacttattctggtgatgattatcgaagacagcgttgttcaccgcttcaacggcttcgaggaactgctcggcaagtgtcttcttcaaatccttgcgtccatcgtcgtaccggtgtccggtgtaagtgaagataccacgcgggcgttttttcgtgcaggcgcgaatcaatgcggtcatagcgatggcctgctgatagggatcttcgatgtctttgatacgcgtgcgaagaacgtcgatcagatgattttcttcgtccgtgtaatacagtcccctgaaggtattcgacacgaaatcgtcggtcgggcaatccttcagcaatgcctttgcctcttgcaaaggcagagtcgcgttctggttttccaccatcgccttggtgaaggtggcgctcatggccatgtagtcgttgcttatgacttgtttgccttgcgctttgaacatgtagctgacgatgcccgatccggagaacaggtccacgaccgagttgaagttgaatctggatgccacattccacagttcagtgagcagtttttgcttggaacccatgaaacgggttggcggatatagctcaacctgcttggataggtttttcttttccggcagagccgccgccagggtcttgggctctggttctgcaatgaccagcgtgtcttctcccgtgcggctgcttgccctgcaggctacggaacgttttgtaggaatgacctgaatctcgtattgcccatacagatcatggaccagcggatgattcgagttggtcaacagaagatggcatcccagcgaatgcagacgggagaattcaactgcaagccgtgaatggtctgagatctcgaactgttccttcgtgtagcgcttgaaatccgagtattcggaaaccggaatgtacggcgggtcaagaaacacgaagtcacctggttcggcgtattcggcaagcacggcggcatagtcaccgcagacaattgtggcattctggagcgctttggaagcttcacgcagggcctgagcgtcgcagatcttcggattcttgtattttccgaatggggtattgaactgccccttgcgattgactcgatataggccgttgaaacaggtcttgttcaggtagatcgttcgcgccgcagcttctaccggtgacagcttggtccaatccagagaacgaaccttgagaaactgctctcgctcgttcttgtatccaacgagaatggcgatcacttcttcgacatgttcccttacttgtatacataggttcacaagttcgggattactgtccgcgatcacggcgttctcaggacgaagcgcgaagaacagcgcaccgccaccgaagaatggttcgatgtatttgccatagtgcgccggaactttcggaagaagcacgtcaagcatctgggatttaccgccagcccacttcaggataggctttactcggccattggacaccctagctgacgcttgggtgctatttgttttcgcacgtggacggccagccttcttaggagaaagcatgcgctccagcacgtcggagaggaacggatcgccgttatcggaacgcaacgtgccgcgccgaaccagagtagcgactgtggcattcttcacgcctagtatttttgcggcctctgccttggtgatggttttatcctcaatcggcatgttttgagccgcgtaattcccaagcggggtgcgccaccaagacggatccttctcgcctttttcgatgaagactgtacagactttctgccacttcggttctctgctcaattcagaaagagcattagctgattgcttaatctgaagaataatatctcccgcgtcgatgccgaacatgggcatcatgtcgaataggccttgtgattcgttgaggagctgaagcgtcgcctcttcgagcaaggtagtcattgttcctcaccgacctttggatcatgtctttattaatgtctaagaactagtttgacattttcgctggacagatccaattaatgcctgatgtctgaggcgtgccctacgctcgatcagatcgagcgtaggaagaccagaggtttcgctccggtctggactcaagattccaaccgcgactagcttagtgattcgatgctgtttcgctgccaagcttgcttatatctccgataccggtctagaagtaagataatgaagaattcaggcggatgaatgaggtatagatagctatggtcgatcacattgaaactcaatctgttgcccacggtgtggccaaagctgagcctttgatcattagcgaaacttctaggactagggtcgtctttgagcccactgtccataatggaggcgttcggggcttccttaagcgtcaaaacaaaaatgcttctggagaatggtcggatgcgaatggcgtcgatttcagaaatgcagaccctgacactattgtttctatattgctaaaaacagatgatctaaggaaactgtatgactttctaacaaagctatacaaggtgcaagagcacggggttgaaaaggggacgcaagactatgttcttgcgaagaaagatgacttgatcattacaagctctaatgttgctcaagcgattcgagagctaatagaccaaaaccattcaaaggaattctgggatgctttggttaaacatcaagcagaacttgcactgcggttggcggaatcgcaaattcagagagaacgagaattgataattaatcaattcagacaagaccttactgcctatggttctgatgaaagtcattggcagatgttttttgaaaagcatccatggattcttcaatcagcttttgccttaactacttttcaacttcagggtgaaacttttcttggcgggaaaaatacaaaaggtagaaatggtcaaggcggagttgccactgattttctattcaaagatgaaagcacgcaaagcttcgctgttgttgatattaaaacccctaaggcagagttaacgaataagacagcatatcgaggaagaaggaatgcgggtaactcgaatgtcgtttatcccatgcactctgatctgtccggtggagttgttcaggttcgcacacaaatagcagaggcgattgattctttcgattacttgcttcataagtcttatcctgatctcaacagagttcaccccaatggggtcttggtcataggaacctatgactctttaagtgaagagcaaaagaagtctttcaatcattttaggcatggacttacaggtttaaccgttatcaccttcgatgaattgctgcgtcgattggagcagttgtattgcttggatgaagtgaataacgattcgtcggagtcgaatgacaactggataaatgatttatttaatggttccgatccatgggcgaatgcgacagcatggcctggagacagttattaaatgcgtattcagcgtattctcgacactccgaacgccaccagcaacacgacggtcgattccagtaaaaaaccagtaacaatgaccgtcacggtgagccaatcccagtcggctcaacaaagacagccaaaaatcaagaaccgccattttccaacgatattgggctcaacgaaagctattcaacccaacaaagaaacaccccgcgaaaacaggatgtcgcaggttcaaatcctgtcagcccgaccggagccctactcccgcttggggagtgggagtagagcttgaaatcgtgttgacggacgttgtcgctgcagtggccttcggtgcggtggcggaggccgcctacatcgtctaaggagcatcatgcggatatcggcaccgtgatcacgctcgggtccgggttcgtggcgttgatcgtgcccgcgttcgttcgggtattcgagaagtatattccccagcggatacgtcggatccgtgttcctcgccgcatccatccggttcggcgtcatcgccatcgccgccaccggcggattcgacggtacttatatatggggcatcgtgctcgcgggcgtagtgggcatcgctcagaccgtgtacgcactcgtcaaccaagcatttgacggaagactgtctaaagcgtagaacagtgccgggtaaggcccgaaatcctgcgcactttgtgatttgagtttcctggaagaggatatggcccgtgccgggtacgattttcagtcgctaacactagaaaaccgcgattggaaagaggcagaggccatgtccaaggaaatcatacagttcgatgacgccatgttcgagacaaagctcgacgccatggtgcgtgacaaggtagaacaaatagtcaacgcgatgcccgacgcttcaggccgacgagatcgccaacgccgcgagatacgaacgaaccggcgaacgcaaggcgtaccgtgccggccactacgaacgcagcctgaccgccaaggccggagccgaaggtgcccaagctcaaaggtgccctgttcgagtcggcggtggtcgaacgctgccggcggcgcgagtccggcgtcggggaggcgcggaaaccgcactgcatgaagaacagccgcgcggtgatgctggcatggacggtgagccgatcgatgccggctacgtcggcgaaccgctcgacttgtccgagcaatagcgaggccacgccctgccgggagcatgaggaatccacgaacagcatgtcgatatacccggctttgtcgacgtcaatgaacccgaccggaacgttctaggtttcggaagattcccgtatggggtcttcgagcggatatttcgcggtttcggcgacccatgtgtgcaccgttatccggcgttcgttccattgcccaggtgtgccggtatgcccggcccatgcgcgaatctgttcgccgttgtaatcccgggaggcgatgccggtcgcgggccgacggaacaccgccatcgtggcctccgcggcatcgggccgatacctgcgaatcatgaaacgcatacctgaaagtgtaagggaaatcaggcatacggcgcggagaacgatgtcgtcgcaatccctcgcagtctgtgagccaactcgtgagccaaccgaccaacacgacattcaggtcacgataattctgatgcgcccggtcgcatctcactgccacatcacattgtcgagatccacaccgaatcttgtcgcgttggcttcaatcaaccaaccagttctggcgcaaacgcgattcaatggttctcctgcttgccgcgcaggaacacgatcgggatgatgatcagcggcaccgcgcatgcgcccatggccagtgaataaccgctggtgagccactggccggtctgcatgctgacgcccaaatccttggcgatgggcggcagagccgtggtgagcgccgtggccatgacggtggtggcgatgcacgagagcatgatgtcgatgaagatcaacgtgcgacggtggttgctaagaggtgctgttcggtggtggttgttgtgacgtgtgtagtggtgtttggcatgattccgtttcgatttttggctctctgcggaggctcaagttccaactaaaggttttgcttatcgagctcttggtagtgctctttgatcacggtgaggatttcggcgaattgttcgcgctgctgagcggtgagcacttcgagcagtttaccggtggctccgttatcggccgcacgtcggcgcatcgcctcgtccttgccctcctcggtgagcgcgaccagataggtgcgcccgtcttcgggatggggagtgcgcgcgacccatccgcgcgcctccattttgccgagcaattcgctcagcgatgccgaccgtataccgaggatcgcggcgagccggcgctggctgaccggcccgagaccactgacggtcagcaggcagcgcgactggccgctgccgtatatcagcgaatggtcgcgtcgtgtttcgcgttgatggctgatacgcgccgcatcatagaacagctccgccagcgctttgtcgttcattgtcgtgttcgtccgcctccatcgtttttgcaaggtacctaatgagtaatacaaggtaccttgacaaatgagttcaggttacggcgcattcgggcgaggctattcgtcctcgcctagcgcggcggatggggggtgagcacgctggtataggggatgtcgccggacaggacgccgtcgtagaagcgctgtttggcgtcgatgaagtcgatggaatcccgaatctccgcgagctgctcgaccagccgcgcccgcttgtcggcgagcatctgcttgcgctcggggatgctcggctcgccttcaaagcacagttcagtgtatcggcgcatttcttcgatgctcagaccgcaacggcgcaggcacagcagacctttgatccatgtgatgttgcggtcgtcgaagacgcggcggttgttggcatcccgtttgaggttcggcaccagaccggcgttgcagtagaacttcaacgtctcgtaggcgagaccggtcgcttcgcaggtctgcttcatcgtgtacatggtgcccctccttacgttcttttattatccggcagtgcttaccggtagtttctaccggtgtgtcgtgatttgaccggtagctactaccggaaaatatagtggcagtcataacacggctcccgttagagggaacaccaaccctgacatcaacgaaaggcaatacccatggagatcatcaccctgcgcaatggcgtcgacatgcccaagctcggctacggcgtcttccagatcgccaaggacgacaccgcgtgctgcgtcgccgacgccatcgaaaccggctaccgccacattgacaccgcacagtcctacttcaacgaatccgaggtgggcgacggcatcaaggccagcggcatcgaccgaaaggagttgttcgtcaccaccaaggtctggctggaacactacggctacgagcagacgctcaaatcggtcgaggtctcgctcaggaagctcaagaccgactacatcgacctgctgctgctccaccagccgttctccgacgtgtacggctcatggcacgcgctcgagaagctctacaaggacggcgtggtgcgcgccatcggcgtgagcaacttcttcccgtaccgtctcgcggacctcatcgcgttcaacgagatcgcgccgatggtcaaccagatcgagaccaatccgttcaaccagcaggttgacgcgcacgcctacatggtagaacacggtgtggtgcaggaggcgtgggcgccgttcggcgaaggcaagtccggcatgttcaccaatccgacgctcgtcgccatcggcgagcggcacggcaagtcacccgcccaggtgattctgcgctggctcatgcagcgcgacatcgtcgcattgccgaagtcgacgcacaaggaacgcatggcgcagaacatcgatatcttcgacttcacgctgacggacgacgacatggcgtcgatcgccgcgctcgacacccgcaccagcctgttcttcgaccacgccacgcccgcggctgtcgaacgaatggccacgctggtcaaagagcgcgccggacgggaatgacctgccggaggcggtgcatatagctcttcgccgacggcctgaaacgtagcgacggacaggcaagcgggcatgatggaagcgatatttcgccgcatcgcggaaacgcaaacaaacaaggaggagccatggccgtcgagaacgccaaggtactgatcatcgtgaacaattggggcatcgaggaaaccgagctgacccgcccgttgcgtgacctcaaggccgcaggagccgcagtgacgctcgccgccgcgacgctcgacccgtgcgaaacagtcagccacgaccggtacgagggcgagacgctcaccccggacgcgctgctgtcagacgtcaacgccggtgattacgacctgctggtggtgcccggcggcacctgcaacgtcgaccgcatccgcgtgaacgaggacgccatcgcaatcgcgcaggaattcgcccacgaaggcaagccgatcgccgcgatctgccacggcgcatggctgctggtcaatgccggactcatcgcagggaagaccgccgccccctgccgctacattcgtgccgatatcgagaacgcgggcggccattacgtggacgagcagctgcacatcgatgacgccaacggctggcgcctcatcacttcccgcaagcccgccgacctcgactacttcgtcgacgccatcaaaaagaccctggcctgactcatccgactcgggacgggcggcggcgaagtcggatgggccatcgttccagccggcctcgccgcgcggccaggcgagcgacagcctaagccgctcaggcgatgaaacgcagatatgtgagatcgtcgaaagtcgcgcgaccctgaaaccccttggtcgaccgataccggtcaatcagatccggatcttcgctgcgaagccgctgcagctcgcgttccgattcgtcgagcgtgggccgcagcagcggatagccatcagacgcgagcaccacctcatcgccgggagagacgggcacagtgcggatggggtacgtcatgtcggtgaacccgtcgaacacgaagtagccgaacggccctcgtttgttcgcgaactgcgattgcaaccgcaggaacggcagtatcatcgcgcgcgacgggtccttcggcgccgcatcggaagccggtgcgccgaacgagccggatatcgggacgtcgggcgtgccgtcctgcatctctcgcagcgcaagcaccgtgaacgcgcgcagatcaccgagcaacacatcgacatccttggtcgtcggcgtctgcacgccattgaccatgatctggcagtcctcgaacagccacgcctcatgccgccgggcgctgtataccactgcgttgacctgcagacgttccactggctcatccgcgaacacccgaattccggcctcatgcgagcggtagcgggcctggaaacattcgtcaaccgcccgctgcatctgtcgcatcgatgcatccgcaggcatgccaccgatgacgccgagcatcagatccttcgccacgacgccgccacagatgccgcacgcttttgcttgtcaccccatccacgacggccgcgaagtcatccgtgaccagcatcccgtcctcgttgagcgactggtcgttccgcttgccccggcaataccgctctatgatacgcatcatcaggcccgtgcgcattgggcgaacgcgcggtagaggatgttccgcgtcgcgtcgccgaccgacccgtccaccagtatgatgtggtggttgccgtcgtcgcgctccgtgacatcgcgttcgccggtcgatgccacggcctggcgcaaggcggccatgtctgcatcccattgcggtacgggcgtgccgaacgagcacatgtcgaacacgaatgcgcaaggggtcgggttgaaggatgacgtcgtgcgctcgctgtatcgatatgtgtacgcgctcggtgttccatacggtcggcctacgcgcatgtaatcgtcgatggcgcggttgacgcagaagtcgaattgccggaagcctgacggcaagtacacgttgtagttgttcgccgcacggtcgagtttgtctcgccattggccgtcgaacatctctcggcgactgtcctcatgagcgccggggccgagcgtgtacgatccgagtcgagacaggtattccgcctgcaccgaggcggcgagctcctgcaacgaccctgcgcccaagccgcccgccgtcgtggtgctggtgctactgtcgtccggcatcgtgcgggtcaccgtcgtcgtgccgtccttcagcgtgaccacggtggtggcgatgccggtgtccccgtcgcgcgaactggtgcgggacacgaccttgccgtcggcatcgcgccgcgacggtgaagttgcggatgccgatgcgtcgggcgccgcgccggcaccgccctgatgcgaggtggcggcccatatcgcgatggcgaccgccgcgatgatgatgacggctccgatgacgaattccatgctggttccttcaatggcgccggtggtgattgcggtgctggccgctgttgaccatcctatcgtcgccagtgggccgccgcctgaataattccgaatggaaacgcggtcccgggctgcgctaatcgccgtttgaggcgtgaaagcgggattagtgtgggcgaaattggtgatatctacatttcgaggggttgatctgatggatcaggaacatctatctgcatttcagggggttgcccaaacgcgatatccgaagtattaagcgctttttgctgctgggattgcacggttttgggagcgttcatacttggctggcaccccctcgaaacgtagatagatgtccggcgagaccgaaatcaacccctcgaaacgtagatacggttcaatgacgatgtgattccgggcttttcgcccatgaccgggggagagaagatggcgaatcgcgccggaaaggggtcatgcccgaaccgtgatacctcgtcatgactgcaacatggtgatgccgccgtccctgacgagtagtgattgacggtcagtgagcgcgcgtaggtcgagctccgtggaataccgttcgacgatgagccgtgccgcctgacccatcgtgggattgcccagatgcggcaccacgtggaaatccgtcagaccaagtcctttgtagttgcgcagacccggggcgcgatccgtgcggtccatgatggagcagtagccgatgtccggcgacatgatgaccgaaccggctgattcgccgatatacgggatcccgtcggctatccgttcggcgagtagcgcatccgcgccgctctgccgcagttcctgcagcagaaagaacgaattgccgccgccgacatatatgcagtcggcgtacgagagggtgctccgcacgtcgggggcagcggccgttgaaacatccagttcggtgacgcggaatcccagttgacgcagttggcggcgggtcagcatcgtatgcgcgaacccccatggctccacggccgcggcggtcgtgatgtacgccagtcgaccgccgtgcagcccgggcagtgcatgcgggatcatccctgcggctccgcgcagcgtcgatgtgagcatcatggtcgccatcctggcctcctttcgtatcgcccagtataggaccgcgttcatgagagcgctgacagatgaaaggtcgaatgcgcgcggtggcgtttggcgctcgcctggcccggttgccggaaatgacgacatgggcgcgaacgattccgccgatgcggacggaaaatgccataactcgaacgaagacgatacgattggacgcatgagcgaaacgaacaatgacaacctgtggccggccccgaccgctgacggtccgctgaacgcgaccgtgaccatccccggcagcaaatccctgtcgaatcggtacctgatcctcgccgtgcttggcgcgaagcccgtcacgcttgtcgggctgttgcgctcgcgcgacaccgaactgatgatgggagcgctgtcggcgcttggtgtgcgctgcgacatcgacccggaaaacgataccacagtcacggtgacgccgccggaatccggccgattcagcggcaatgtgggcgtgtactgcgggctcgccggcacggtgatgcgtttcgtgccgggactggcgctgttcgcggacgccccggtgcggttcgatggagacgatcaggcatacgcgaggccgatgcagccggttctcgacgggctcgaacagcttggctcccgcgtcgaataccacggcgagcacggccggctgccgttcaccatcacgccaccgcgtcatgatggtgaacaggccgatgacggttccgctgccgccaaggtgagcatcgactcgtccggctcttcacagttcatctccggcctgctgctgatcgggtcgcgcctgcccggtgggctggagttgcggcatacgggggagaagacgccgagcctgccgcatatccgcatgaccgtcgctgatgtgaacggcgcgggcggcaatgcgaccgctgatgaggagtctcgcgtctggcgagtcggccatgccgcgttgcagctgccggaacgcgtggtcgtcgaacctgacctgtcgaatgcggcaccgttcctcggtgcggctttgatcgccggaggcacggtgcgcgtgccgcactggcctgttgagaccacccagcccggtggactgctgccgggatatctggaacgcatgggcgcgcgcgtctcgttccccgaagaggacggcgtgcggtattgcgaggtgagtggcgacggccatgtgcatggtcttggtgatttcgacctgaccgcggcaggggagatcgcgccgtcgctcgcggcgatactggcgtttgccgatgctccgacccgtatgctcggcatcggtcatctgcgtggtcatgagacgaaccgtctggaggcgctggtcacggagatcacgcgcatcgggggagaggcccgcgaactggaggatggcatcgagatcactcctgtgccggttgagcgtctgcacggtgaggtgatggaatcctacgctgatcaccgcatggcgacgttcgccgcgatgatcgggctggccgtgccgggcgtccgaatcgtcaacgtggagaccacgcgcaagacactgcccgatttcgtgggcatgtggaccggcatgttggatcggtgaccgcgacgaatatcacggatatacgatgaggggctgattcccagcggaatcagcccctcatttatgttcgtccgtttgcgttagacggactgcggcctgctaacggcagttcgtcacttggtgaacgtgttgccgtaagtgtccgcgccgttctcggcgatttcggcggacttgcgggcgatggccagctcctcgttcgtcgggatgacggcgatgatcacggaggagtccggggtggagatgatgcgcggctccttggagcgcttcgcgttcttctcctcgtccagcttgacgccgaacggggcgagcttgtcgcacaccatcttgcgcacgatgtcgtcgttctcgccgacgccggcggtgaaggtgattacgtcgcagccgcccatctggtaggtgtagttgccgatgtagctgacgatgcggtgcacgtacacgtcgagggccagcttggcgtcctcgttgccctcggccaccagacggtgaacctcgcgcaggtcgccgaagccggtcatgcccatcatgccggagcgcttgttgaacagggtgtcgagctcgtccacgttcatgtgggcgttgcggatgaggtggaagaccacggccgggtcgatgtcgccggtgcggccgcccatcatcaggccttcaagcggggtcagacccatggaggtctcgaccggcttgccggaaacctcggcggaggcggaggctccgttgccgatgtgcagcacgatctgcttgaggccttcggccggcttgccgatgacgccggggaccacggaggagatgaactcgtgcgaggtgccgtgggcgccgtaacggcggatgtggtactggtcggcgatctccttgttcagcgcgtaggtgctggccgccttcggcagctggaagaagaaggaggaatcgaacacgaagatctgcggaacgtcgggcagcagcgcgcgcatgacttcggcgcccttggcctccggaccgttgtgcagcggggcgagcacggccaggtccttgacggcgttgatggtcttgtcggtcacgagggccggcttcgggaagagggatccgccctgaaccacacggtggccgacggcgacgatgcctgcttcggacaggtccgggccgtactccttgaagaagccgagcacgcgcttgaggccctgctcgtggtcgtggatcggctcttcgagctcgtgcttctcgccgttgtactcgtgcttgtagtgaccgtcgaccggttcgccgatcttctcgacgagaccggaggccagaccttcgccggactcaagatcgaccagctgatacttgatagagctggaaccggaattgatgacaaggacggttttcgccattgtgggcatcctccatgattgatacgtaccgcgaaacacggctttccatctgatagattactcgctgcttgctacaaatcagcgccgtaggtttcgccgagagccaccaaagagaaaagccccgctgacgggctgagccgtgaagtaaacagcggggctggttataggtgaagagcgaacgacagattgcacatgcccccgctggcgggggctgtcgcgaagcgactggggacggtcgtaaagagcggctgtaccgcgtggagaccgctaaaacacccgcgtcactgggcctcgatggcggtcagtgcgatggtgttgatgatgtcctgcaccgtcgcaccgcgtgagaggtcgttgacgggcttgttgaggccctgcagcacggggccgatggcgagcgccccggaggaacgctgcacggccttgtagccgatgttgccggagcacaggtcggggaacacgaacacgttgacgtgtccggccacgtcgttgcccttggccttggtggctgccacgtcgggcgaccatgcggcgtcgaactggatggagccgacgacgggcaggtccggagccttctccttgacgattcgcgtggcctcttcgacgatgtccacgtccggccccttgccggagccgagggtggagtaggagagcatgccgaccttgggctcgatgccgaacgccttggcggtcacggcggactgcagcgcgatctccgcgagctgttcggcgtccgggttgaggttgatggcgcagtcggagaacacggtcacgtggtccttgaagcacatcaggaaggcgccggagacgagcctctgcccgggcttggtcttgatgacctgcagcgccggacgcacggtgtttgcggtggagttgaccgcgccggacaccagaccatcggcgtaaccgagcacgacgagcatcgtgccgaaatagctcgcgtcggtcagctgcttgcgggcctgctcttcggtcatgcccttcttggcgcgcagctcgcacagcttggcgaccatgggcttgaggatgttctcgtcgtccatggcctggaagcgtgccttgcccagatgggtcagaccgagttccgcgccccgggcgaggatcgcgcccttgtcgcccacgatgatgaggttcgcgatctcgcgctccagcaggtagtcggccgccttgatgatgcggtcctcttcgccttcgggcagcacgatcgttttcttgttcgccttggcgcggccgagcaggctgtactggaaggcgtacgaggtgatcgggaagtcgatctcgacgttgatggcccgcaggacctcttcggtcggcacgttcgcctggaaggcggcgagcgccgcatcggcctgtgacgcctcggtgaacgggatctgggggatcgtccacaccggcagcccgaagtccgcgagcgtgtccttgaccgagacggagtggcgcggctcgcagcccgtcacgaagatgcccagcaccttgttgccggcggcctccatgccttcgatggagagacggacggtgtccttgagctcgtcaggccaacggtcgatggtgcacacggcgaggaagacgccggcctgcaggtcggcggcgatgttcgcgttgaactcgtaggcggttgggtcgttgacgtgcgacttgtcggtgccgacgatgagcgccgcgtccgcgcgggacacgttcatcgcgtcgttgaacgccgcgacgatgtcgccgcgggagccttccttgtctttgcgcacctggtgaatgtccagtccggtggacagcgcgacgccgaggccggcgttggaggcgttcagcaggatgggggtgaagtggtcgtgattggagaccgcggggcggaacacggtggtcttgaatttggtggtcagcgccttgagcacgccgtatgccacgacgttgcgtccgtttgcgccttcaggacttgcgatgtagatgttcgttgttgtcacgtttgtctcctcgtcggggatggtactgctcgtgtgaccgccttgtttcacacttactgacattgtagtacccgatcgttcgttgccgggcgttgacatggcggtaaacgcggccgggacgatgtagtcgttgcgcccgtatccgtcgtcggagacgatgtgctcgatgtcgtgggggtagcctgcgatggggtagtgcaggtagcaggtgatgccgagctggtcgaggcgccggcgataggcgtccgcggccggctgccccgcgtactgggtgagcacgacggagccgacgtggaattcgcacgagcggaagatgtcgatgagtcgcagcacgtcctcgtcgtacgtgatgccgaggtcgccgcgcatcttggacttctcgatgtggttggcgttgatggcgatgacgatctccacgtcgtcggcgaggcttttgagcatgcggaatttggaatccggctcgaagccgggcagcacgcgtgacgcgtgatagtcatcgaacagcttgccgccgaactccagatagagcttgccgccgaactgcgcgatgcgctttcgaatgttggcggcctgcagctcgatatatttcttgttgtcgaatccctgtcgcatgtgcagtgagagtcccgtccgaacggagcgctgtacctgcagattataccgggttctttacgaggaccacccctcccagtcgcgaagcggctggggtcttacaagaatctacgagtgaaattcggcgatgtgtgcggtagcatggcgcgggaagcgaaggcgtacaagggtacgtcgagcttcccgtaacgcagctaacgcacacatcgtcgaagtccaccggtgaattggaataacgtgtgtggcctctaggcgcaccgaaggaagctgtacaaaggtaccgcgactgaggagcaacgacgaggacactccgttattccaaattcactcccattcgatggcttcagttctgccgtcacgtcattccagttgcacccagttttcggcgccgtctcgagccgagtgccgccaagtaacaccgtgtcgtgtttcgtcggcctcggggacaaaagtggggacaacttttttcaaactcagggctttgagtttttgtttttgtcccaaagcgtgcggcggaccgcctttggaagctcgatagcgccgaaaacgcccgttttgaaactcaaccgtcccgtatcctgcaagccgccagctgcaatcgtaagcgaatcagcacgggcggtttgcacgccattcgcaaaaccccaggtcgcggatctgcgccatcggccggcaaagtgagtagtctcaggtggcttgcctatgagttggcggacgggctttgagattccgctgacgcccggaaacgcttcgagctcccttgaatttacagacagcatacggtataaggtaattggttttccgttaggaaggcttccaagtgccggggacgttttcccccggctttttcggctcttgtgttgttttcgtgggtggtggctcgtcggtgagccgttgaatcccaaggtgtgagggggcgttttctgtatcgtgttttttgttcaggaaaaccggagacagaaaacgccttatgaagaacatattcaaacggttgctgaacgtcaaaggcatggtcgtcgaggacgtgtccatcgacgactcgccgctgcgtcccgctcccgcgccggtggtccgggtgcggcgcaggaagggcgcgttgcgttgcccgcgttgcgggcgcaagtgccccaagcacgacgacgggggcggcgaacggcgatggcgccaccaggacttcggctgctatggggtcgagctcatgggcctggcgccgcgcgtggcgtgcgcggagcatggcgtggtggccgcccaagtgccgtgggcggagccggacagccggctcaccagtggtttcgagatggagtgcgcgtggccggcggcggtcgccaaccagaagaccgcgggcggattcccacgcatcgcgtggaggacggccggccatatcgcgcgcagggtcgccgcccggttggaatcctcgatgccgtgcatgttcgacggtcccaccgcgataggcgtggacgagaccagctgcaggaagggggcacacgtacatcaccgtggccgtcgaccacaagcgcagacgggtcgcttggacgcacgacggatacggcaaggaggtgcccggcctgttcttccgacagccgaccgacgagcagcgcgcctccatacggatcgccgccggcgacggcgccaagtggatcgacgccagcgtgaaggagcgcctgccgaacgccgagcgcgtgctcgactcgttccacatcgtctcccggatgagcgacgcgcccgaccaggtcaggaaacggttgcggaaccaggcccggcgcggcaacgacaagacggcgaccgaggcgatgcgcggcgtcagatacgccgcgcccaagaaccccggcgacctgaccgaacggcaatccggagcgttggagacgcccagggacacggatcccaagggccagccctaccggtcatggcaactcaaggaactccccaggacgctcccgcaccaacccctcggacaagccggggccgaattgaaacgatggatcttccgggcctcccacagccgcatccccgagatcgtcgaactgtgcaggaagatccgcagacgcaaggacgacatccccaaaaccatcagacccggccactccaacgccaggctcgaggcgttcaacaacaagatcaaggccaccatccgcatggcctacggcttccgccacgtcgacgacctcatcgccatgatcaaactccgatgcaacggcccacccatccacctaccaacacccatcctctaacccacgaaaacagcagaaggctctcaaaagaagagtctctctctcagggaagaaaaaatcctttacggaagcctgtttgctccatgctgcaaacgattttcttagtgaagacttgaatgctccattcggagcgtatattgcaacacaatgtttggcacgaaggtcaagcctacaatctaagctccctattccataagcgttcttagcgcagattgagagatggtccaaagttttcccgatctcgataatggcagaccattttaacctctattattacgctctttctgataagccaaaaacatgagttcggatggtttatggtcccaactagtggtatacgcatccgccttttcaagccaccaggcgagacggtcttcaggtgcaaccttttcaccccagtactcttcaaataaagcgctatccaagtaggaagccgccttttccataagtcgctgcagaccgacaacgccctcgattttattcccaacgcttccggcagaattgatgtcacgtgcgttataaagcaaaacaccacgataggtcatgaaatacatagctgcgtctttaaaagcagtagttttaattcgcccattccctcccttgccatctgcaacgagcgcagggcaaagaagcgttgcctctgctctataccggtttttagtagctttatctagtgcgggataaggaatcaaatcgatgtcggtgctatgctcttctccactagatgtatcttctagccaccacagacgtccgtcagggtgtattttgcgagcatattttctgatatatggcattttgtccataatatctagcttgcgaaattcatcatagggaatgcccataacggagaagagagactctttttccccgctcaaatcaacttgaaatcgaggctcatgtgaagtgcgtacatggacgacgcagtcttcgtacttcatccaccgggtttcgggttttccgcccatctttccaaacatgagatagacgaccttaacgctttcgtcgcgtttcgtttcgcgaacggagttggcaatagaaacccatttatcatcattagtgaatttaacttcgaccccgaatggtccacatggaacatcggggaaggtttgtccgctcgggttaaggtcaacttcgtgaccaaccccctcgtcgcccattgcgattacggcgtaatgcaacctctcacgaacatgctgttcgtaagacaaggctttagttgactgaaccgagagccattcggctctcggttcagtgttcatatcgttggtcagttgttctgcaactcgatcaagtagttgctcaaattgttgctgattcatcctgcgtattactacctagcgtcaaggcaactttttttgccagttgccatgctaatacaggtggaacagcattgccaatctgtctttcggtttctctaagaccggagacaaatttaaaagagtcaggaaaagactggattcgagccgcctctctcattgatatacgcctaggaaggtcgtaatggtattgaatgttaccgtgacattcagcacgaatcgtatagcctggcctgtccgcaatcagatgacgattgccttgttctcccgatttctttgccttgctccatatgtgagatgtttccttatcccatggcttagatgcaaggtcgtcaatcgcctctttgacggttacgggacaatcgggggtggtttctttgggaggaacaaacgctggcagcccttctcttacccctacaataaagaccctatctcgagtctgtggcacgccgtatttcgaagcatcgtatcgatgtattgacaggctatagccaaggcttccaaaatcttccttaatcttatcgaaagattcgctattagtttttaagaacaagctgccaacattttcagcaacgaagaccgagggattcgttctctttaccgcatcaacaatcgcagtatacagactactgcgctctcccttaatacccttcatttttccattaatgctaatatcctgacaaggaaagccgcctataacaacgtcaacgtgttcaggaagaagatctatcttatcgttgatgtcaccctgaatgatgcttccgagattttgctcgtaggttttgcacgcagctgggtttaattcattagcccatacgatatcaaaggggagatcagcatactctttcccgagaaatgtaaaccctcctataaagcctaaatcaagtccgccgcaaccagaaaagagactagcaacagtccattttgcctgcgaagaaggatagggttcggagtcctcaacggcccagtttcttcctatctttttggccgtaagaagcttgccctgttctgccagtcgtcgaacggtatcagagctacgtccgtgttttaatgcatagtctttaagcgaaatcaacatgattcttcctttcaagaaggaagctattatacacgatagcgtgtaagaggcaaatccatctttctagatcagagaataaccttttacctggtaatacttcatatctaagttagtaatgagctaaatagatttgcgcgctaattgcgataatgcaacagactgactccttgaaattcaggtctgtactcgaaaacgcaaagaatagcatcgaccgtattccgcatcgctattaatccatccagcacgatagccacccatggctcgacgaagttcgttttgtatttcgtatgcgagaatcgtttcgctgaattactctggtgcgccaaggtatttttgataatgaactgtctatattcagcaatgtgccgagggtagttttagtgcaagcaaactagccgacaggcgtactagtgcataccatttgtcgttcacgcatgtcagaaaaaaccttttcatatgctgtttagcatcagataggtaccatttatccgggtgcatctggggcaacgggttgaaaagcctgcgcaaggtcgctcgcagaacacgcaacagcaaacacgacagaagaggctgtacttagtcaagtcggtgttttgggtttgaggtggtgacgtttttttggactcgttgagtcaaggagggcgttgtcatgacgtatagcaggcagcagtgggatcgggcggtgggcttgtatatcagatacgagtgttgcgccgcggatgcgatccatgagcttgggtatcccagcaaggaagccctgcggatgtggtaccgggagcggctggaggaggagcgcgccggcgtgccttccagacgtggggaacggcagcggcgttacagcgaggagcagaagtgcgcggcggtggaccattacctcgagtgcggcagacggctcagccgcaccatgcggatgctcggctatccggaaagcaaggaactgctcatggcgtggatcgacgagctggcgcccggccggcgcaggctgagacacgggccggtgcccgaggagttgaagcggaaggcggtggtggcggtcgcgtccggaaggttgaaatcgcatgaggcggccgccgaactgggcgtgcaggccgcggtcgtgcgagaatggaaacgacagatgctcgccggatccaaggagacgcacgtggcgagagaacgcagggaaagacccggggacggaggcggcgcacggcccgtggttccggatgcgcgcggtggccgccggttcgcgggatgcggccggtctggcggacgcgttggcgtcgatggagaagcggctggcgcggatgcaggcccgtctggacgagctggacgccgacgtcgagcggcagcggcgggagaagagggagctcgacgtcgagatcgcgatccgccggggcgcgttggagctgttgggaaaagagccgggcgcagacccggaaaacctgaccaaccgggagaagacgattctcgtcaagcaaatcagtgaggctcagagcgtgagcgtgaaaagcctgctgcccgtggtcgggctcgcgcacagcacctaccattaccggctcaacgccatgaggaggccggaccgggatgcgtggctgcttcccttggtcgagggggcgttcgagaacagcgagaagcgctacggctacaagcgcgtgcacctggaattgcagggcatggggataacggtgtcggccaaacgcgtcatgaaactcatgaccaagcacggcatggtgccgttgttcaagagcgcgaagcgctacagctcgtacaagggcgagctcaccagggctcctgagaatctggtcaaccgcgacttccacgccgacgggccgaacatgctgcgggtgacggacctgaccgagttcagcatcccggcgggcaaggcgtacctgtcgcccctgatcgactgctacgacgggcttcccgtcgcctggacgatcggcacgagccccaacgccgagctggccgacggcatgctttcggacgcgtgctccacgctcggcgagggcgacaggccggtcatccattccgatcgcggccgtcactataggtggccggaatggatccgcatctgcgaggagcacaagctgacgcgttcgatgagcgcgaagggctgcagcccggacaacgccgccgctgaggggttcttcggcaggctcaagcaggagttcttccacaagcgcagcttcgccggggtctcgatggacgagttcatcggcatgctcgacgactacatggtctggtaccgcgacaaacgcatcaagaccgagtttggcatgagcatcatggaccggcgccgcgagctcggactcgtggcataatcaaaaagcaaggataaagaagtccaacaaaacggcaccacccccttcgccctcggggacaaaaaactgcgcgtccactcacttgggatgactccttacttccgttcctccgaataccgccccgtactttgctgttttgaaacacggggagtaagtggcgaaatcgcaggtgaaagggagtaaaacggcaaagaaaaaaagcctccgtcccaacgtgggaacggaggctcgattgccgtatttattcatcgctgtcgctggcggctttgccgtgagtcgcatacgaaacgagactcagcggcatagtgcggcactcgaaagcgcagatcaaagccctatcggctcactcccactcgatcgttgccggcggcttggacgtgcaatccagtaccacgcggttgatctggcggcattcgttggtgatgcgcgtggagatcgtggcgagcacgtcataaggcacgcgcgaccagtcggcggtcatggcgtcctccgagctgaccgggcgcaggacgatgggggagccgtaggtgcgctcgtcgccttggacgcccaccgagtgaacgtcggcgagtagcacgaccgggcactgccagatgtcgcggtcgaggccggcgcgggagagctcttcgcgggcgatggcgtcggcctcgcgcagcaggtcgaggcgttccctggtgatttcgccgatgatgcggatgcccaggcccggaccggggaagggctggcgccagacgatctcgtcaggcaggccgagctcggtgccgatggcgcgcacctcgtccttgaagagggtgcgcagcggttcgatgagctggaacttgatgtccttggggagcccgccgacgttgtggtgggacttgatgttggccgcgccgtcgccgccgccggattcgacgacgtcggggtagagggtgccctgcacgaggaacttgacttccttgccgcgggcgccggcctcttcgaggacctgacgctgggctttctcgaaggtgcggatgaacttctcgccgatgatcttgcgcttgcgctcgggctcggagacgcccttgagcgcttcgaggaagtcggcggcggcgtcgacggtgatcagtcggatgccggtggcggcgacgaagtcgtgcttgacctgctcgacctcgcctttgcgcagcaggccgtggtcgacgaacacgcaggtgagctggtcgccgatggccttgtggacgagggcggcggcgactgcggagtcgacaccgccagacaggccacagatcacttcggcgtcgccgaccttctcgcggatcttggcgacctggtcctcgatgatggaggaggcgtcccagttgtcgggcaggccggcgcactggtggaggaatgtctcgatgagcttctggccgaggggggtgtgcttgacctcggggtgccactgcacgccgtagagcttgcgggactcgtcttgcatggcggcgacgggcgcgccctcggtgtgggcgagcacttcgaagccggcgggcgcggtcttgacggcgacgccgtggctcatccacgtgtcctgctcggccggggagccggcgagcagcccgtccgtcttgtcgatggtcgtgtcggtcttgccgtattcgccgagcgcggccttgtcgacgtcggcgccgagcgcgtacgccatggcctggaagccgtagcagatgccgagcacgggcacgccggcgtcgaacagcttgggatcgacgcgcggggcgccgggctcgaatacggatgcggggccgcctgacaggatgatggcctgcgggtccttggcgagcatctcgtctaccggcatggaatgggggacaagctccgaatacacgttcgcctcgcgcacgcgacgggcgatgagctgcgcgtattgggcgccgaaatcgacgacaagcaccgggccgttagccatgggactcccttcatgcggccgcgcgcgatagcggatacataggtatgggcgatatcgttgattgcggccattggtattgtgtggacttcttacagtatgtcacatcaattgtggcgattcgagccgacattggcgtgtgcgatgggcgggtgtcgtccgggagcgacgcaccgtttcacaaaaccgaacaattaacgctgttaatatgaacaacacgccgcatgttctgttgcctgcatgaacacgcggcgtaccggtagatcgctgaaatcgttggaaaataaaagtttctcactggatggcgccgtaatataacctgtgagggcaccggttattcactcataatttatacaattaatctaacattttcgaacacacatgcaaaaaagctgccaaaagtcttgctctcaacgtaccatgatgaacgattgggattgagcaaccgcgaaatcgcaaggcttcgcgagagcccatgaccgaacgataatgatcaattgcacatcactgtgcaggagtacaggagtacacatgacgagtcctgttattggcaccccttggaagaagctgaacgctccggtttccgaggaagctcttgaaggcgtggacaagtactggcgcgttgccaactacctttccatcggccagatctatctgcggagcaacccgctgatgaaggaacccttcacccgtgaagacgtgaagcaccgtctggtggggcactggggcaccacccctggcctgaacttcctcatcggccacatcaaccgcttcatcgctgaccacggccagaacaccgtgttcatcatgggcccgggccacggtggccccgccggtacctcccagtcctacctggacggcacctacaccgagacgtaccccaacattaccaaggatgaggctggcctgcagaagttcttccgccagttctcctacccgggcggcatcccctcccacttcgctccggaaaccccgggctccatccacgagggtggcgagctgggttacgccctgtcccacgcctatggcgcgatcatggacaacccgagcctgttcgttccctgcatcgtcggcgatggtgaggccgagaccggcccgctggccaccggctggcagtccaacaagctcgtgaacccgcgcaccgacggtatcgtgctgccgatcctgcaccttaacggctacaagatcgccaacccgaccatcctgtcgcgtatctccgacgaagagctccacgagttcttccacggcatgggctacgagccctacgagttcgtcgccggcttcgacgatgaggaccacatgtccatccaccgtcgcttcgccgagctgttcgagtccgtgtgggacgagatctgcgacatcaaggccgcggcgaacacggacaacatgcaccgtccgttctacccgatgatcatcttccgcaccccgaagggctggacctgcccgaagtacatcgacggcaagaagaccgagggctcctggcgcgcccatcaggtgccgctggcttccgcccgcgacaccgaggcccacttcgaggtcctcaagaactggctggagtcctacaagccggaagagctgttcgacgccaacggcgccgtcaaggacgacgtcctggccttcatgccgaagggcgagctgcgcatcggcgccaacccgaacgccaacggtggcgtgatccgcaaggatctcgtgctgccggcgctcgaggactacgaggtcaaggaagtcaaggagttcggacacggctggggccagctcgaggccacccgtcgtctgggcgtctacacccgcgacatcatcaagaacaacatgcacgacttccgcatcttcggaccggatgagaccgcttccaaccgtctgcaggcttcctacgaggtcaccaacaagcagtgggacgccggctacatctccgacgaggttgacgagcacatgcacgtctccggccaggtcgtcgagcagctgtccgagcaccagatggaaggcttcctcgaggcctacctgctgaccggccgtcacggcatctggagctcctacgagtcctttgtgcacgtgatcgactccatgctgaatcagcacgccaagtggcttgaggctaccgtccgcgagattccgtggcgcaagccgatcgcctccatgaacctgctggtctcctcgcacgtgtggcgtcaggatcacaacggtttctcgcaccaggatccgggtgtcacctccgtcctgctgaacaagtgcttccacaacgatcacgtcatcggcatctacttcgcgaccgacgcgaacatgctgctggccatcgccgagaagtgctacaagtccaccaacaagatcaacgccatcatcgccggcaagcagccggccgccacctggctgaccctggacgaggctcgtgccgagctcgccaagggtgccgccgcttgggattgggcttccaccgcgaagaccaacgatgaggctcaggtcgtgctcgccgccgccggcgacgtcccgacccaggagatcatggccgcttccgacaagttgaaggccctgggcatcaagttcaaggtcgtcaacgtggctgatctgctctccctgcagtccgccaaggagaacgacgaagcgctgaccgacgaggagttcgccgacatcttcaccgccgacaagccggtgctgttcgcgtaccactcctacgcccacgacgtgcgtggcctgatctacgatcgcccgaaccacgacaacttcaacgtccatggctacgaggaggagggctccaccaccaccccgtacgacatggttcgcgtgaacgagctggatcgctacgagctgaccgccgaagccctgcgcatgatcgacgccgacaagtacgccgacgagatccagaagctggaggacttccgtcaggaagcgttccagttcgcggtcgacaagggctacgaccacccggactacaccgactgggtgtactcgggcgtcaagaccgacaagaagggtgccgtcaccgccaccgccgccaccgctggcgacaacgagtgatgatcgcctgattcttatcaggatctgagttgaaagggcttccggagcaatccgggagccctttttcgtcaggctccaccaagcgacaatatcgctcgtgagaatggtcatcgcctacaaaccgacaagtcgtcatgacacgacgggtaaatccacactacgtagtcatctccatatataatcaagacgtccgctgaatgcgacccaccgcatgacggtccctcgaagaagaaggtgatgactctcttggatgtatcattctcatatttcatccaacaggtatgttcgaatccggcgctggccatcaccacgttgctgacgctcggcgtcattttcgtgaacggctggaccgacgcccccaacgccatcgccacctgcgtcaccaccagatgcctacgtatccgtccggcggtgatcatggccgcggtgctcaatttcttcggtgtgttcatcatgacgcagctgaacgcctcggtggcatccaccatcagcaacatggtcgatttcggcggcgacacgaacgccgcgctgatcgcgttgtgcgcggcgctgttctccatcgttgtctacagtgtgggcgcgtcgctgctgggcatccccacgtccgagagccacagcctaatcgccggcctttccggcgccgccatcgccatccaggatggcatcggcggcatcaacatgggggagtgggtcaaagtgctgtatggtctcgcggccagcctcctgctcggatttggcatcggctggatcgtgtgcaagctggtgacgctgatctgcgcggggcttgaccgcaggcgcgccaacgtattcttcacgtatgcgcagatcgtcggggccgcggccatgagtttcatgcacggcgcgcaggatggccagaaattcatcggcgtgctgttcctcggcatggcgttctgcagcgggcagaccggtgtcgcaggcgtgatcatcccagtgtggctgatgatcctgtgcagcacgatcatgggtgtcggcaccagcgtgggaggggagcgcatcatcaaatccgtcgggcaggacatggtccggctggagaaataccaaggcttttccgcggacctgtccagtgcgctgtgcctgctggtgatgaccgtgctcggcatccccgtttccaccacgcacaccaagaccagtgccatcatgggcgtcggagcggtgcgcaggctgtccgcgatcaacttcggcgtcgtgcgcgacatgatgctcacctgggtgttcacgttccccggctgcggcatcatcagctacgtcatggcaaaactgttcatgctggtgttctgacaccgctccggcacacggcatcagtcatcgtttcaagaaaggatcagcatatggcgaggaaaaacgattcgttctatttcgacggattcaagcagagcgccgattatgcatgccaggcggcacatctgctgtcggaagtcatgcaccattacgaaccggatcgtctgctggaacgattcgacgagatgcatcgcatcgaacaggcggcggacgaggtccgtcacggcatgatggacgagctggtcaccgcattcatcaccccgttcgaccgggacgacatcgcgcggctgagcagcgtgctcgatgacgtcaccgaccgcatcgaaggcgccctgcaccgcatgtattacgacaacgtgctggagatccgacccgatgcgctggacctggtcgatatggtcgagcgttcatgcgggaagatggcggagctgatcggcgagctgccccggttcaagcggtcgaagaccctgcgcgagcaggtgttcttcatcaacaagatcgagcaggacgcggaccgcctgttcgtagaggcgatgcgccgcctgcacaccacctgcaccgacccgctgcaggtcctcgcctggcacgaggtgtacgtgcatctggagctgtgcaccgacgattgcgagcatgtcgccgatgtcgtcgacaacatcgtcatggagaatagctgagagcggttccccgtcccggccacggcgttggacgggaatgccgcctaacggtgggtgttgagccacgcgatggcgagctgggtgcggttggtcagagcaagcttgtcgagcatcgcgctgatgcggttgcgcacggtgccctcgctcagatacagtttggcggcgatgtcgcggttgtcgagtccctcggcgacgagcgccgcgatgtcacgctcccgttcgttcagcagctgatcgatgccatcagacgtacgacggccgtgcgggatgccgtcgccggccgtgtccgaggcgtcgtccggccccttgtatccggcaccggccgtcggcccggtgagtttgccgatcacgtcggcgccgagcaccacctgaccggccatcaccgcatgcagggcgggtgcgatcgccgccacatcctgcttgatgagatagcctttcgtcccgagccgcatcgcctgctcgatataggcctggtcagagaacgtggtcaggaacaggatacgtgccgccggatccttcgtcaggatctcccgcgcggcgtccagcccgttcatgccgggcatctgtatgtcgatgagcaggatatccggatgattctccggcgactcgaaatacctgcgaatcgccgagccgccgtcgttggcgctccatagcacgtcggcggtgccggtggcggtcaggatcgtctccagcgactggcagacgatcgggtcgtcgtccacgatcgcgattctcatagcttccccctgttccctgatgtgctggcagtcgtcttcatgaatgccggctggtctgttttcgcgcaagatcccggggatgcatgccaacgttgcttcggcacggacacgaacacgcgccatccgccatcatacgggccgcacagggcggttccgccgattgagcgcacgcgcgattcgatgtcggtgagtcccatgccgcgaggcggctccccgtccgtccggcgccgcccgcgggcatcacgggcgcggatcgcgggccctggatcctggacgaccaactgccacaatgtcggaaaatcacgcagcgtcacgctcgcctcatgggcctcgctatgatgcgcgacgtttgccagcgcctcgcgaatcaccgtcgcgaagcagcgtgacaccggggccggggccgtgtcgacgtcgttcgccaacgacaccgagaagtccggggagatgccgtcgaatgaggcgacggcggcttcgatctgcgcggcgaaatcggtgccatcatcctcaaggtcatgtaccgagcggcgcaccatcgtcatcgcatcgtccaaggtctcgcccagcgtggtgaatccacgggccgcgacctcgtcatcggtcgcctcggccacggccctgccggcctgcgcctgcatgatcgcacgagtcagcaggtgccccacattgtcgtggatctcgcgggcgatacgcgtgcgttcgccgagcgtcgccatgcggaccgactgcgcgcgctcctcatcgatatcggcgatgcgcgagcggacggaacgggaggcttcacgggccatatcctgagcgtgcaacagcgcacgccgattcccatccgaagcctcgcgggaccgtcccgcgacgaatccgagcaacgcggtcaacgtaagagccagcgcctgcatatggctgttggcatctgcggctccggccgcgacaccggcatgcgacacgcggacgaaccacagcgccgcaaacggcaacaaccatagccagcgcacggccgtcaccagccacgaggggcgccctgcggcagccagacgcgccatatcgtaggcgacaagcggcatgaacgagcaccatgcgggcaccgccgcggcgacgatcagatacgccacgcaaggcaaccacggccatcgttcatcggcatgcagccattcgaccagtccggtgacggagacggccagcagaagccccgcgatgaacacggcatcggtgcggctcccggtcatcacggcgagcacggtgcccaacgcgagcagaacaccctcctcggccaacacgcgcatggcacctcccggatcgtcattcgtttcaataccagtctagcggtggaaggaactccacgaacatgccgatcgtggcggataatccgcgtggtggctccctgacgatgggtctgttctccaaccggaccatcaacatcggcatcgtgaccgagatcgtgctgctcgtgctcatcaccgaagtgccggtattgcagaccgtgttccacaccgcgcccccgggccgggacgactacgtatacctgtgctgcatcccgttcgtgatcctcggcatagaggaactgcgcaaactcatctggcggcactctttcccaaccgagcgggtatagcgtgctccgccccccccgctggcgggggcaagtggcgccgcgagatgatgacaaatgtcacgggtgcgcggccaagtcgtgacgtttgcaggtggcgatcgccgacactttcttgggatgatgtaatcatcaaagaaaggagcggctatggcaaccgacaacacagcccccggacgcgatgtggcacccgacgcagtgccggccgtgcatgtcagtcaactggtcaaacgctacggtgacatggtggcgctcgactatttcgacctcgacgtgacgcaaggcgagatcttcggcctgctcgggccgaacggctccggcaagaccacggcgatcaactgcatcctcgcgctgctcacctacgattcgggcacgatccgcgtactcggccagccgatgacgccgacctcatacgcgctgaaacggcgcatcggcatcgtgccgcagaacgtggccgtattcaacgaactgaccgtcacggaaaacatcgactacttctgctcgctgtacgtgccgggcaaagccgatcgcgcaccgctggtcgaggaggcgatcgaattcgtcggattgcaggatttccgcaaattccggcccggaaagctttccggcggccttctgcggcgtctcaacatcgcctgcggcatcgcgcacaagcctgacctgatctttttcgacgagccgaccgtggccgtcgacccgcagagccgtaattccatcctggaaggcatccgtcgtctcaaccggtcaggtgccacggtgatctacacgagccattacatggaggaggtcgagcagatctgcgaccgcatcctcatcatggatcacggccgtcacctggcgctcggcaccgccgacgaactcaagaacatgatcgacacgggcgagcgcatcaccatcgaaacgctcgacctgacagatgccgcgttggctgatgtccgagcgctgccgtgcgtcatcgaagccgtctatgacggcaaggaactgaacatacgatgcaggcggggcgagcacaacctgaccgacgtgctcgacgctgtcaaacgctccggcgccaacatcggccaccttaccagccatccgccgacactgaacgacgtgttcctcgaactcaccggcaaggcactgagagactgaccatcttgcccctgctggcggggctcccgcgaagcgagtgggggtggccttgcaacaaccaccctcagtcggcttcgccgacagctcccgccagcgggagcaggtaaggagacatcatgtggaccacatttttggtcgcattgaaagcgaacctgcgcaatcgtcaggcactgttctggatgattgtgtttccgatcgtgctggcaaccatgttcaacgggttcttcggcggactgtccgagggatacgagctcaaaccgataccaatggccgtcgtcgaagatagccgctggcagcaggcggacggagcgcgtacgtttgtggatgccttgtctggagagacggcctcatcgtcggagtctttggacggcacggcatacgccgatatcaatcagcaattgctgaccatcaccgcagccgacaccgtgcggaaagccgaacagctgctcgccgatggcacagtccgcggctacctggctgctgacggcaacgggcgtttggcgataaccatcagtcgggaaacggtgaccgcggccaatgacaccacaggaagcgtcggactggatatcagcctatcggcattgcgcagcgccatcgacctgtacaaccgcaccgacgccgtcacccgacaaaccatcgccgacaatccacaggctgcgctcagccgcaacttctggaatagcatcgggcaaagcgtcgatgtgactcacgaaacaacgctcacgcatttccagcccaatgccatcgccagatactattacgcgttgctggccatgtcctgcatgattgccatggggtactcaatcagcacggtctccacagcacaagccaacctgtccgcattgggcattcgccgcaccgtggcgccattgagccatgccagacagcttattgccggtttccttgcctgctggttgtgcgcatcggtcgcattgcttatcgcattggcctatattcgcttcatttgcgacatttcgtttggagggcgagaaccagtgacggtggtcgcggtaatcatcgccgcattcatgaccagttcagccggtactttgctcggcgcggtaccgaagctttcctacgacacgaaatacggtttgtcgagcggaatcgcctgcacattgtcgctgttcaccggactgtacggcggcttcgccatgcagatcagtgactggatagcacgcaacgcgcccatcctcggcaccatcaaccccgcgcaacaggtgacgaacctgttttacgacattttgtactacgacagctaccagccgttcatcaccacttgtgccattttgctggcgatgagcgcggtattcctcttggccggcatcgcaatgctgaggaggcaacgctatgaacacctgtaaagccacgctgcgcgtgctgttctcgcacagggcctacctgttgatttacctcgtgttcgtgggcatcatgatgctgtctatcagctggtcgatgctgtctggcacatccgattccgcagccgcggcattcgagccggccaaaatgcgtgtcgccgtcatcgatcgagactcggacaggggcggcatcgcgtcatcgatgcgcacatacctgtcggattccagcgaactggtgaacgttgacgatgctagtgaaactctgcaacaagccgtcgcctcgaactgggtggatctgatcgtcatcatccccgatggtttcgccgacgatttcattgatgccgcggcgacaggcgagaatccaccaagcgtggacacggtcaccagctatacgtccggcgcaggctcgatggcccggatgaacgtcatcgggttcctttcactcacgcgtacggcactgattggctcgcatacgacggtcgatagtgcggcgctcgcagctatggccggtatcgacattggagacactgcgggtgattcgtctgaagatggcatgggcgggtttggtgaattctcgaatcaggacatgcttgatatgctgccggccggtcagattgagaaacccagcgtcggcgatctgttcgaggcatcgaaagcggctgccgcatcggcgagtgacatggacgcgaaccataaggtcgctgtgatcgacacggcaagcgcggacgcggaaagtgcttcggacatggcggccagcagatttggcaacaccatgaaaaccgcgctgtatccgctgtttttggcgatgaccgtctgcgggtcaatgattctgggcatattcaccaccggggaagttcgccgtcgtctcaccgcatccccacaacgcatgtcgtcgatgggactccagcggttgctgacgctcagcggattcgcgctcgtcgtatgcgtcggttatctggtgctggcggtcggtctgatggtcgcggcaggacttgatccgttgacattgagcgccgaaggagtgctgatgacgttctgcgcaacctgcgtatatgcgctgatgaccgtcgcctgtggattcatgctcagcgaattcgggttttcggaggcggctgccaacggattcgccaatatcttcggcctgctcatcatgttcacgtcgggcgtcgcattgccggttgacatgatgcccggcgtgatggtgaccatagccaagttcctgcccggctggtggtattgcaccgcgatcgacaacgcgctcggctccggcacggcggaggaaaccggcataagcgtcgccggctgggccggctcgctgggattggtcgcactgttcggcgtgatgttcatctgcatcggcctggccgccggccgcttccgccgatcccgtcccaccctggccgcgcccgccaccacgcagctggccgagtgagaaaatcagcctttcaaccgataccgctgtaccgagtcgtcggcgaacttgactcgggcgacccgcccttccttcatcagctcgcgcataccggatgtggcggccagcggcgtcaactgcagttcgcgcatgatctccttgacgctcatcgccgaatgccgctccagtacggtcataatcgccttgaccacgtcgcccggcgaactgttcgccatcgtgcgttgcttggtgatggtcatcgtgaacgtgttgatgtcgttgcgcgtggtcgccggctcgatgccggcctcgcgcaacgcggcggcgatgcgctggtagccgtcgccgccttctgggttcacaaacccgccgcccggatacggcgtggactccagcagcgtgaacaggaactggtttcgggtggagacgaacggcgcgcccgtcaccggatgcggactcgccagcacatcatgtgtcaccatgccgtacaggccacccggattggtgatctcgatgcgatcggtgaacacgctgatatgcacctgcgtgccgcgcgcatcgggcgaataatcacggtgggtgagcgcgttcgcaatcgcctcgcgcaacacgagtggcggataatcgggcttcttcgcgccaatccaacgcatcagcgagtcgaccgcatcgtcgatcatcaccggaatcgaaccgaccaccgacttcgaggcgaccaatcgttcgtcgccccggaacacatcgtcccggctcgtccccggaaacacggctatcgaaatgccgagccgcggatagaacttctgcggatagcggcccaacgccagcagtccggccaaggtgggacgcagtattccgccgacctccgactcgtcggaatcatcatggcgcaacacctgcagatccagcagcacatcgatgccgtcccggtcggcgaacacgcacggatgctgttcgcgcacgcgtgccaacaatccggcaacaagctgcgggtcgaggtcatcggtcgtggcgccgggcacgatatccagatcgtaggtgggctgcagatgctcctcgatgagccggtcgacctcataggaggtcatgcgccggtcgccgtcgccggtgcggatgaacgagccgccgtgcggtccgagcgcggtggtgaagcagggcttatcgcgcggcagcatttcgtcgatgcgcgcgaacaccagattcgtgccttcgaacgggcaggtgacgatcacgggccgcaccaccggcgtcatcttctcgcacgcctggctcagcgcctcctgcatggcgcgcgcgtcgaatccctcgaccggcgtgaacccgttcttttcagacaggccaaggatgatccagccgccggagccgttggagaacgcggacagcgtatcggtgatggtcgaggagatcttgcgcttgcattccttgacctcgcactgctgcgtatcgttgccgatcatgcgcatcagctcgatcagctcggtcatcttcgcggtgtagtcgtcaaccatggcggtcctccttgacaccattgtcccgcggccggctgtctgccgaagcctcccgcgcccacgtcctccgtcaattcattgaaaattcacgcggttggggtgcgcataagactgttgttttcattggtgcagtacgaggtcccgttgtctgtttgtaagtgcaatgccttcgtcagagttgtaagttcagcagttcgtcggcaaacgcctcggcgggtgtgcggtagccgagcgctcgcatgggccggttgtcggtctcgtcgacgatctcctggagttccctcgccatgcccggttcgatgatcgtgcgtttgggcaggtaacggcggatcatgccgttgcggttctcgttgctgcccgctgccagctggaataggggtcggcgaagcacgtggccatgcccggctcgtcgcgcagccgcgcgtggcgggcgaacccggtgccgttgtcgtgcgtgacgctgagcctggcggccgccggcagcggggcgaacatcgccagccgcgccccgacgctccgctcggcggtcttgtcggggataacacgggccatgaggaagcgggtcctcctttcgacctcggtgtgcaggtcgcatcccatgccgatgacgctgtcggcctcccaatggccgaacccgctgcggtcgtccgcctccggcggacgctcggcgatggagacccttccggggatagggaacctcgacacccgacggcccgcatgcttgcgccgccgccggtggccgcgcggcaggcatcgggcccagcgttcgcggcgcggcttgccggaatagatccatcggtagacggtctccgggcacacgcgcatggcatcgtcgccggggaacaggacgcgcagcctgccgctgacgggcggcggcgaccagccgcagcccagtctctccgccacccacgcccacagccggtcaggcgacaggcgatgcggcttgcgcgctttggcgcgcctccgggcggccttgcgccgggccggcccggcgatgtaatggcggctcgtccaaggcctggtcttgagccgcctgggccgatagggacggtaggattcgctctcgttggacgggaaccacgtgttgcgtttgatctcacggctgacggtggacaggctgcgcccgatcatcgcgccgatcgcccgtatgccggtcccgttgccgacctcgatctggatgacctggcgttcctcttccgacaggtgcgaatacacttcccccataggtgcaacatcccttccggactggttttctagacaatctccaatctaacggggtgttgcactttcatttagacaacggggcgtttgtcaagcaaccggtaggggagatacaattatcttgtagcgttgatcgattccaaggagggaattatgagctatatgaaaaagattgcttcaacgctcgcggcggcagtcgcgtccgttgcttttgcccttgttccaagcgttgcactggccaatggcaccgatagcgttccctatgaggcgaacgccactgttgtcgttgcccccaacgctcctgaagggtcagagttgatctttgaccttgagacgaagacgttcactgacattgttctcccgaacggacgcacgcttaagccaagccgtggttgcaccaacaatacttccgcttgctgggcaggcggcggagcgctcggcgacatggagtttacgggtactggcgcggttaatggcaattggcccagccggagcagcttctactccaataacaagtcagcggacatcggtttcacctggaaaggagaacgggtgtacgtaagccagattgctgcaaaccgcaaattcacgccaaacggttctgtcgacggcttctacgtcacccgttactaaaacctatgggagagcacatcctttccctacaacacctttagacggagggccggtgtcttcgggcgccggccctccgcgttcctagcggctgtgccggtgatgtggctgcggaatcggttcgtgtgttgtctttgctttttcgatgttctcagccagtctttgtttgattcgttcgttgaagcggctgcggttgagtctgcgcacgcgatcctcgtagggtttacgcatgtggtcgagcgtggccttggatgcgttggtgcggaaggcgttggcctcggcgtaggtagccgggatggtcgtgttctcaagccacggcgccgtttgcttcagaagctgggattgctcggcggcggtcctctcggccgcgtgtcggagccatccgcgcgtgaacgggttcgcgtgctcggccttttcgctggcctcgcgcgccacgtcgatgattcgttgcacgtccctgacttcccgtggaggctcggtcttccaccgttcggtgaggtcggcgagctcacgcctggcctcgtccagttcgtccaccggttccggctcgggacgccgcggttcgcgtccgatctcccgcggcacgggatcaggcttggattccaagctcctgccggacgtgctcctggggggggggcgtgggcgcttcgaccagttgccggccacgcgacgctatgggctggcgatcgaacacgagtgattcccggaaccggctcatcgccgtgtcgagttccttcctggcctgctccttgaattgtccgagcaggccggtcgggtcgcccatctgtttgcggatggccgtcaggtaccggttggccgtggcgatgcgccggttgatcgcattgagtatgctgtgcccacctcgtttggtgatctcgcggctggcgtggccctcgtggatggtggggatacgttcgatgccctgcgcctcaaggctgcggtggtcgatgcgcacgccctcgggcagcatgaggttgcactgtttggcccagtcggcgcgcagccgttcgaggaattccgtggagtccaaggggttgttcgacacgtccacgcgcttccagaccttacggttcttggccccggtcttctgctcgccggtggcggggtctatgaccggtatccgctcgccgttctggtcgagcgcgtattcagtgcgtcgcttcgcagcccatttgccggttttcgggtcgatgcgccggttggcgacgaggatatgcgcatgaggattgttcccggccttgtcggtgtggatggcgtaggtggccgcgtacccgtaagaaatctcgccggtgcgctcatcgcgcatccgccgcgaggtgatgtacgagtcttgttctttggttttaggcgaagccccttttcatagaatcttcccttttcatagaatcttttatattcttttaaactccccgcaggtcttacggcagtaagggaaacgagccattaaaggacccctttggggagaataaaggacccaaaaggggaaataaaccacacacgaggtgcggcatgaacaaagcacacaaaaacgggcttgccctcacacggagaacaagcccacctcaaaagtggaggcattcagcaagttatcgaatctcaggaaccgatctcaatttcccagttgcagtccgaacccttgcacggggtagctggattgccgtgggaatccctatacttcgtgtaatcccagccgttggtctgcttcttggaaccaccggacccgttcccggtgttcgaattgccgctccagccacggttggaaccgtagccgttcgaaccgttccggcccgaatggccggaacccgaccgggacgagccggagggggaggactgcgacctgctcgcattcgccgccgctgcggcagcggcgtcagccttctgcttcgcgctgatcgcgtcgttcacgctcttcgtggccttgtccagctccgacccggcctcgctcatcttcctggtgtccgttcccttgccggcttcgactgccgtgttgatcgcctgggtgagctgggcgcgggccgcattgtctgaggtcttgccgtcggagtctttgagcagcttgcgtgccgtgccctccttgtccgagagcgccttacgcgcgtcggccagggtcttttcgtccctggacttgctcacgttctcggaggcggtcttcacgctcgcctcatgcgtcgcataccacttcacctgcgcatccagcttgcccgcagtcgcgttcaagccgtccgcgtcagccgcgttacaggcaagcgtcttcggcgcctcgacgtccagctcggacgccaaggcggacacgaccttcgcatccgcgacctgctccgccttcaccgccttcacgtcgccggtgccctcgaccgtcttcgagtacgcggcacgcgccttgccgaccttcgccagcgaaccctcgcacttggactgcgcatcggccaacgcccgcgcattgccgtcacgccacgcgatcaccccgccggtcacgccaccggccaaggcgactatgcacgctccggcaaccaacggcaccagccaacgcggacgacgcttcacgctctcgttcttgacgctgttctcactcatcgtaattctcctggtttctcgaatcatccaatcatcccacgcgcccacgtcaaccccggccggcgcttgcatcccggccgcgacgacacgagcatcatatgagacaactgttctacttgtgtggacaccgccagtactaacacgccgccagacagaagacaaacgaaaacaggcggcgaccgccaaaaacgagcgaacgggaggactgtactaccgatcgacgttactatcgtatcgtgttagtatagtggcgtgagaacacgcgacaaggagctcaacgacttcctatacggtggtcgataccccaacgactatccggccggactcgaacgggctctcatgcgcaaactccagatgctcaaggcggcacacgacctcaaagacctcagaataccacccggcaacagactcgaaccactcaaaggaggcctcgccggccactggagcatcagagtgaacaagcaatggcgactcgtattccaatgggacaccacagaaagagaggcaaccgatgtctacttcgacgactaccacgactgactactacagcacgcccggcgagattctgagcgaggaatttctcgaaccgctcaacatcagccggtaccggctagccaaagccatcaacgtaagcgaaaccgccatcggcgaaatcgtcaacggcaaacgccgtatcaccacgtccatggcctaccggctcgccaaggcgctgggcaccacgcccgacttctgggccaacctccagtccgattacgacctgctgacattcgaccccagcagcttgggcgacatcagaccacttgcgactgcctgaacaagaggaaacccattggtatcgtcctttgcccgtagccgcgacgacgctatcgctcgccgtcgcggcaggactgtgagcagtatatggaagcgatcatgcctgaagaataccggcatggcaggttcggcacagcacgcctgttgagtcgtcgaaacaagtggctgctgctcaaatgcatacgggaaaccaccgtcaaagccaacaggggacgacgttacgtgcaggtcagccgggcgttcttccagctgcggcagataatcgaatacaaggcccgtcgcgcgggccacgcggtcatgctgatagacccggcgtacacgtcccagacctgtccccgctgcggcatggtcaggaagacgagccggcgcaagaacgctcatctgtatgtgtgcgcgaactgtggctaccggtcgaatgatgaccgtgtagcagcgatgaacatccggggaatcggatacgagactctggatcaattaccgcgatgacgagcatcgcggtaattgatcttcgtatttccgcacaagaagtggcggccagaaactctgaccgccactccgagacgccccagcgcaccggggcttccctacgctgtgtcacacaatagcggaatatgccggttcgcttgccttgtgacgacattgtagttacaatggggttatgaggaagttcagggtcgaatcgattgcgaacagggtacgtgatgaaaatgggcattgaggcccgaggggcgtgagcttgccatcaacgccctgcgtgacgtgttgtacgagggttcgttcgtgaatgccgtcggtgagccagagaaccccgaggcgtgcgtccgttgcggttcggtccacatcaggaggaaaggacacggcaggtacggcttccagcgctggctgtgcgtggattgtaattgcacgttcaatgcgaggacgagcagggtcgtggcctcctcgaagctcaagcccgccgtgtggtttcggttcatcgagtgcttcgtggattgcctgagcctgcggacgtgtgcggcacggtgcaacgtgtgccgcaagacggcgttcttcatgcgtaggaggctcatcgagtgcatccgtggctactccccgtgttccatgccgaaagcggtacggaagtccaattggacgagacgtatcaccgtgagtcgttcaagggcaaccacacccgctccacgacgttcaggatgccgagggaatcccatcaccgtggcactccagcgagcaggaggggcctgtcgaaggagcaaatctgcgtgatgactggcgtggatgacgccatcggtgcgtttctcacgttgagcggccgtggcatgctctcgatggagcgtgccatcgaatcgttgggttcccgtctcgcacgtggtatgcatgccgtgacggacaaggcgatcgcttacgcttacgccatgcccaagctcggtgtcacgctcacgcagacggatgcgaaatcccatgccatcaacagggtgaacacgctccactcgaaccttgagggtttcatgtcaggcttccgtggcgtgagcacgaagcatctgcaatcctacttggactggttcgagtggcgacgcacgttcctcacggaatcactcgacgatgacggcaagctcatcgcccgacagctcaacaacggcttgtaccgttcccgtcgcaccagttacatcaacctgcgctccccgtatctggactactggggcatgtgacgcatggcttgaaccatcttgtgcgtacactgtaatcacaaggtaatcaaggactggaggaagcgcatggcgggcattcccacgaccacgatgcgcatagacccgaaactcaaggaacaggcgaacgaggtgttcgacgatctcgggctgaacatgagcaccgccgtgaacatgttcctcaaagccgtggtacgggaacagggcatgccgttcaacctgcacacgggtactgacaaggacccccaacctgccaagtctgacgagaaatgtgataattactgcacgaaagcgtccatcacggatagtattccccatgacgggcaattagcccgagcatgacaacacaacgagaaagaactctcaaatggcactgaaaaacagggggggtatggcaataatcgccatgtaaccccgaccgacggcagtcattgacacaagcacagtccgcaaagagggatgagttctacacgcagttgagcgacattgaagcggaactcaggcattacaggaagcatttcaaggacaaggtcgtcttctgcaactgcgacgacccgtatgagtcgaacttcttcaaatacttcgcattgaacttcaacaaactcaaactcaggaagctcatagcgacatgttattccggctcacccatcacgggagacatcttcgagatggctggcattaccgacaaggacacgaggaccccgtacaaggcagtcatcaccaccgtgcatgacaccagcggcgatggcgggatagacatgttggatgttgcggaactattcaagaccggcgagaacagcattgaacgccttgaaggtaacggagacttccgctcacccgagtgcgtggctctgctcgacgaggctgacatcgtggtcactaacccaccgtttagcctcttccgtgagtacattgctcaactcatggagcatgataagaagttcgtcgtcatcggcaatcagaacgctgtcacctataaggaagtgttcccactcatcaaagagaaccgaatctggcttggctgctactcggggaacatggagtttcgggtgccgggtgattatgaggctcacagcgagaatgacaagcgattctggacggacgaatcggggcagaactggcgaagcatcggcgctgcctcgtggttcacgaatctggacatcagaaaacgtcacgacgaacttatcctcgtgaaacgctataagcccgaggattaccccaagtacgacaattacgacgcaatcaacgtgatttgcctgatggaggaatcacggcggctgcgggaagcccgttcgtattccagcaagtctgtcaggcggattctgcgatgacgtgatgggcggggaaaaaggaatgagtcctttatctaacattctgactagcatctgtcgcgatactcccagtgtacgcggcttgttccgtcgtgagttcttgttccgtggcgctgatcgtcacgctcttcccctcggagagcagtatggccgtctgttgaaccgcatcgcgaagttgcttcggcagcgccaatgagtagcattcttccagcttggcttgatacattgcgtacgtgaccataaggccacaacggccaaatgaatcgggaacatcatgagtgattagaacgaacacataccggacggcgccggcgacaacggcgacgccgacgagctggtgtaccaatccgagggctgcggcaaggccgcgcattgcccactgaaacgactcggcaagggcgacaccgcggtcaacatcatcggtgtggccgtctcggccgtcatcgtcgcggcgagcatctacgcgcaatacgcgctgaccaaatgggccgtcaaatccgcgctcaaggaaacacgaccgcacgattgatccggtgataccattacaccgacttgcctttgacgtgcgccccgtcgtgtggcctccctttcataccgggaggccacacgacgaaagctcagcgagcctccgccaatatgatgccggcatcggccatctgtttgcgggccgcgacacccaactcctcgctgaccggaacggtcagatcctcgaacacggtgacatcgaagccgagacgtttcgcgtcaagcgcggtgtccttgacgcaatgcgattcggcgatgcccaccacatccacctgcgtgacgcctgcggccttcagtgcattggccagcgtcttgccggcggactgttcggccgtgacctcctcgcgcgtctggatacggtcggtattgtcttcgatgccttcaaaaccggagtatgccgccgaatactggcccttcttgaaatgatgagcgatgcccagagccgcgatggccggatgaagctcggcgttcggcgtgcccgccgcgccatgcttgggccacgtatccacgaaatccggattgcccgaccagtgtgcgcccggctcgatatgccaatcctgcgtggtggcggtatacgcatactcgccgcgatgcgcgttcacatagtcggcgatcctcccggcgaccgcgttgccgccttcgacccccagctcgccgccttcgcagaatgtcggctgcacatccactacaatcagcgccttggccatgtcatgctcccatcatcgttcgattcgactgacgtttcccatcataagcgaccgatgccaaccgcataagcccctataaacggcgcgcccgacagccggatcgggactcaccggggcagctcattgtcatcgtatcggggcacggcgtttctggtttccgcctccgccttcgccttgctcttggcgtacatcagctgacatgcccagacgacggcgagcacaacggaaaatgcgagtcccgataccacgtcaccgtatttgacagcggtgaatatcggcatggcgacggccgcgacgatgcagaagggcaacgcgatccatgtcctgcgcagtttggcccggtaactcgaatcccagtagccgaacggacggctgcccctgttttccataagcgttcctccggtcatcacgaatctgcgattgcgtcgatgcctacgatgatacggcacccggcgaatcgttatctttccaccgtcgctgccgaagtcggctgatcattccatcgctaagctgtaatgatgggattcaatcggtaataggccgatatggaatctttgctgatgattgcattgcacggggcagtattgggcataccatttcgagcgttgagccacggtgattcactgtgggtacgcgcactaagctggttcccggtttgccctcccagagccgtacatacatcattgatgatgctccgctctgcgtcatccaacgcgatatattgattcttcccctgtagaacgattgaatgatgcgcttcgccgatatgacgatgtggaacggcgcatcgaggatatttcagcaaagtcgggttatggaagcgatctcatatatgacaatgccgtgccggtgtatgcccggaatgctgaacagcttgagatgacttattattcgtacttgtcctacatggcggattgcgatgttggcggcttggtggcgtctgggctaagctttgagaccatgtgcggaatcgtcggatatgcaggtaatgtttcggccacgtgcggcaagccccttcaggtgtgtcttcagggattgcaacgcctggaataccgcgggtacgactctgcgggagtggcgctcgtcgcttcgggcatggggcatgcagtggtgcgcaagaaggccggaaggctcgccaatctcgtcgaaagcgtggaacgtaacccgatgccgcccgcgacggccgccaccggacacaccagctgggccacgaacggggcgccctccgacgtgaacgcccatccccaccccccgcgtacgctggtcgtggcgatatcgcagtccggagagactatggacacgctgatggccctgcgccacgtgtgcgagcagggatccatggtgctgtcgatctgcaacacgcaggtggcgtcgataccgcgcgaatccgatgccgtcagatcatcgactcgctcaagggcatgccggccaagatccaatgggtgctcgacacgcaggcaggcacggcccgatagcgctggtcgatgagggagagctggtggtgttcatcatgccgctcgagcgcggccgtgacgtgctgcacgccaaggtgcggttcggcatcgaggaggtcaagagcagagtcgcgttcatcatcgccgtcgccgaacagggcgaccgggatgatgaacgttatgcggatgtcgtgttccggcgtcccgaatgcccgacgttgatgagcccgctcgtcgacgtggtcccattgcagctgttcgccatggatatggccgagatcaaggggtatgacgtggacaagccgcgcaatctcgccagatccgtcacggttgagtgacgcgatggcgaaggacgagagatggcgaaggacgagagatgacgaacaacaaagacaagtggctgtgcgcattgcaggccaaagggatccgcacgccgcaggatgaggtcgggcgggccggcaggcaccgtcatgacgccccggaggcaaacccgccgaaagatcgggccggttttcgcccggtgaggggaagatccgccaaaccgttcaaggcgaccggtcacaagggcggaatcagccggcagggtgcatgacgcggaatgtttcggcgaggtcgtgatttgatcgccaatgaccacctccagtcgcttcgcgactggaggtggcagatgctctgcagcttagatttttagtcctcgttcttggcgggggcggagaggaatcgttcttcgccgggcagcacggcgttgaggatcacggccaccacgaaagccacggcgatgcagttcgaggcaaagatctggcggaacagggccgggaactgcgcgaagatgtcgctcacctgcgtgaagccgatgccgatggtcaggctcaacgcggcgatggtgatgttgcgctgggtgaagccggcttcggcgatcatctggaatccggaaagaatgatgttgccgaacatcatgatcgtgcagccgccgagcaccgcttgcggcagcgagttgaacgcctccgccacggcaggcacgaagctcgccagaatcaggatcagtccgccggacaggatcaccttgcggttgacgaccttcgtcatcgccaccagtccgatgttctgggcgaaactggtcagcggcaggcatccgaacagtccggagaccgaggagatcaggccgtcgccggcgatcgctccggccgtctcacgctcggtcggcgtacggttcagacccaccttggtcagtgcggcggtgtctcccagaacctcgacggacgagaccacgtacagcagtccgatggagatgatcgcgccccaatcgaactcgggcttgaacggcatgaactgcggcagcgaaacgacggaaagctcctggaacccggaaaaatcgaccttgcccatgcaaatcgccaccgcatagccgaccaccaggccgaacagcacggacagctgtttggcggtgcccttcatcagcaattggaacgccagacaggcgaccagcgaaatgagacccagcgtcaggttctgccaggatccgaagtccgcggcggacgcgtcaccgccgccgaaactcgtggcgcccacggtcagcagcgagaagccgatggacgtcaccacgatggcggagacgatcggaggcacgaaacggcgccagtaccgggcggtcaggcccagcaccagctcaagcagaccaccgacgatcaccgcgccgaccacggctccgtaacccttgtcggcgcagatcgcggccgcggcggccacataggtgaacgagatgcccgtcaccatcggcagccgcgagccgatcagccacgcgccatacaactgcaggcaggtgccgagacccgccaccagcagacccgactgaatcacggccgccgattgcgcggacgtcatcttcgccgcgttggcgacgatgaatatcggggctagattggcgacgaacatcgccatcacatgctgcaggccgaacggaatgcccttccagaacgacacgggcgcgtccagcgaggacagcgcctcgaacgatacggaattcttcgttttcttctgcgacatggtttccttttctctcctctgctctaccgttgctctctgctgttccggactcagtccctgaacgtgatctcgccggtctcgggattcatggactcgacgatggccagcgaatccacgtcatagccctgcgcgcgcagttcgtcaccgccgccctggaaccccttctcgaccgcgatgccgattccctcgacactcgcccccgccgcatggcacagctcgatgagcccatgcaacgccttgccgttcgccaggaaatcatcgatgagcagcacgtggtcgtcggcgtccaaatatttcttggacacgatgacgggaaactccttgcgcttggtgaacgagtacaccgtggtggtgtactggtcgccgtcgaggttgatggactgggccttcttggcgaacaccaccggaacatcgccgaagtggcgtgcggcgcaacaggcgatgccaatgcccgacgcctcgatggtcaggatcttggtgatggtcttgccggcgaaatgccgggcccactcctgccccatatggtcgaacagacgcacgtcgcactgatggttcaagaacgcgtccaccttgagcacgtcgccggtcttgaccgttccatcacgccgaatgcgctcttccagctccttcataagtcccctttgcctgtaccgtcaatgaataggacagagggacagcatacgccatgcagatgaccgcggcgacctgtatgaatccgccacgagtccttgacgaacactttgtgattccaaaatgtttttttgggagggggatgctctagcataacctcgacggaacgggaagtcgtgtaaggagtatcagcatgcgcaatgaccgctatgggagcctggacggtatcaagggattcgccctgatcggcatcatctggtatcacctgtcgcaacgctcgctgcccggcggtttcattggcgtggacgtcttcttcaccgtatccggcttcctgctcgccctgagcgtccttcgtgagatcgaccgtaccggcagactgcgtcttggcaatttctatctgcgcaggttgtctcgactgtggccggcgatggcgttcatgatcgccggctcggtgtcgctcggcctgttcgtcaaccatgacattctggtgggtgtgccgggcaaaagcgtctccgcgctgacattcacgtcgaattggggggagatcttctccggagacagctatttcgcggcgacgtcgccgcaattgctgcggcacttatggttcgtggcgctgctggcccaagcgacgctggtgctgccgcttttgacggccatgctgcacagaatcggctccacgttcgtgcaggcgttggtgccggtgctgctcgccgcgctgtccgcgtgtggcatgtgggtgctgtacaacccgtccgccgaccccacacgcgtgtatttcggcacggacacgcactgttttggcatgctgttgggtgtcgcgctggcgttcgtcgtgcggcacagcgaggagtctgacgccgagccgcgccgcctgttcaccatggttatgccctggctggccactggcgcactggtcgtgttgatcatgatgatgccgcgcgtcgggcaggatgcgtcagcgttccgcggcggtctgattctggcctctgtgctcaccgtagtgctgatcggcggcagcatttccaaggattcatggatgatcggcctgttcggctggcgtccgctcgcgctgctgggcaaatactcgtatggcatgtacctgtggcattggccgttgtacctgctgctgcagctcatgcttcccggttaccgtggcagcggattgtgggtggtccaggcgctcacgttgctgctgagcctcgtgatgaccgcggtgtcatggtggatggtggagaatccggtcgcggaatggatcaagtccaagcgcgacaagtcggctccccgccgcacggtggcgcaacgttcggctccgcgacgggtcggcagcgcgcgggcacgtggcgtgtatgggacgcacctcaacaacgtcgagttcactcagccgtactctcaggctgcgcccctgccctcgtcgcaagacgcgccggtcgtcgcatcccgcagctcccgtaccgcgaagacgatgcgcatggtcgtcaccgtgtcggttgtggtactgatcgtcatcgggttcttcatgggtgtggcccaggccccggcgaagacgcagacacagatcatgctggagaagaaccagagcgcgctcgccaagaaggaacgtcagcgcaagatggacgccaaggccgcggccgaggcgaagaaacgcgccgaggaggagcgcaagcgccgcgaggaggccaaggcagccatcgagaagaccctgaacggcgaggacgtctccgtgatcggcgactccgtcaccgtgggcgcgtcggcggcattgcagaagtcactgcccggcatcgccgtggacgcccaggtgtcgcggtccatcctgaccgcgcccggtatcgtcgcgcagatgaaggcggaaggccgtctgcgcaagtacgtggtgatctcgctgaacacgaacagcgcgaccacggtcggcgaatacgagcggattgcggccgcggcgggtgatgggcatgtgctggtcatcatcaatgcgtatggcgaccgcgagtggattcccgtggccaatcaggcggcctccgactatgtgcgcaagcatcccaccgattcgattctggtcgactggaacagtgctatcgcggcacacaccgattggctcggaccggacggcatccacccgcaggccggacaaggcgaagacctgtatgcctccggtctgaggaacgcgttggcggaatgggaggtcgcccatatcgagtgacactgaccgaaccatgtggtaaacaggaaagccgaatcatcgtcaaccgtcagggggaacagcgtgcagcaggatccggatctcatcgcaagaagcgccgaggaactcgtcggcgacctcaacccgcagcaagccgaggcggtgcagtaccgggggcccgcactgctgatcggcgccggcgcaggatccggcaagacacgcgtgctcacccggcgcatcgcgtggatcctcacgcaattcggagcatggccgagccagatcctcgccatcaccttcaccaacaaggcggccgctgaaatgcgcgaacgcctcgaaggtctgatcggaccggtcgcccagcgcatgtgggtgtcgacgttccattccgcatgcgtgcgcatcctcaggcgtgacggccagtcgatagggctggcgtcgggcttctccatctatgacaccgccgactgcgagcgcctcgtcaagctgatcggcgccgatctcaacatcgacctcaagcgctacacgccgcgcgcgatcctctcgcgcatctccgattacaagaactcactgatcggctggcaggagcagctcaagcgctacgcgcccgactaccggcccggccagcgcggttatcagatcggcaatttcggcgacatcgaggtgctgtattccgtcatctacgccgaataccagcatcgtctggccatggcgaacgccgtcgacttcgacgatctgatcggccggacggtcgaactgctgcgcacccaaccgcaggtggccgactattaccgtcataagttccgttatatcctcgtcgacgaataccaggacacgaaccatgcccaatacgagctgatccgcgagctggcgggcgtggacgcggccgggcaggtcgtgccggacgccccctcggcggggcgggccggcccggcatggatcaccgtcgtcggtgactccgaccagtcgatctatgcgttccgcggcgcggacatccgcaacatccaggatttcgagcaggatttccccaacgcgaagaccatcatgctcgaacagaactaccgttccacgcagaccatcctcgacgcggccaacgcggtcatcgccaacaaccagggtcgcaagcccaagaagctgtggaccgcattgggcagcggggacccgatcgtcggctatgccgcggacaacgccgagcaggaggccgcgtggatagcgggggagatcgctcgcgtccgcgccgaggagggcacgccgtattcggacatggccatcatgtaccgtgccaacgcgcagtcgcgtgcgcttgaaggcgcgctcgtgcatgccggactgccgtatcagctggttggcggcacacggttctacgagcggcgggaggtcaaggacgccatcgcgtatctgcaggccatcgtcaatccggccgacaacgtcaacatgcggcgcatcctcaacgtgcccaagcgcggtctcggacctcgtgccgaatcgatcatcgtctcatatgccgatgctcatgcgaccacgttctgggacggcattgaccatcttgaccagatcgacggcgtgcccacccgcaccggcaagcagctcgccgcattcagggacctgatgcgctccctgagcgcgttcgcggccgaacatgacggcaagccgtccgaagtggtgggggaggtgctctcgcagtccggtctgctcgaagaactgcagcggtccgaggatccacaggatgcctcccgcgtggagaacctgtcccagttgcagtccgtcgccgccgaattcgagcagaacacgccggacgccacactcgcgggatttctggagaccacggcgctggtggcggactccgaccagctgccctccgagggcgaggactccggcaaggtcacgctgatgactctgcacaccgccaagggcctggaataccccgtcgtgttcctcaccggcatggagcagggcacgttcccgcactcgcgggcgatggaggacgccgacgagctttccgaggagcgtcgtctggcatatgtgggcatcacgcgtgccaagcgtcgtttgtacgtcacccgtgccgccgtgcgcgcgcagtgggggcaggccaacgagatgatgcccagccagttcctcgatgagatccccgaccggctcatcgactggaaacggcgcgaaaccggcatggagggcatgcgctccggctggtcacgccgcggcttcgacgacgagttcggcggatgggacgatgacgacttcggcggcaccacatacggcgggtcgtcctcgtacggtggttcctcatcatacggctctcgtggacgttcctcgtacggtggttcctcgtcgttcggctccggttcgcgcggcggatcgggctcgtcatatggcggggccaggggattcggctcatcttcgcgccacggcggttccggccgtcagggctccggacagcagtacgggtcgggcagccggttcggctcatccacgggattgtcgcgtggcggcaaggtcacgacgcgccgcaccgctcccaagtcatccctctcgtcggccaaaccggcctcgtcgctcagcaaggacaacaacctcaacatcgccgacttccatgccggcgacaaggtcacgcatgaccagtacgggctgggcaccgtcgtcgacacgcaggacaagggccgtaactccgtaatcacggttgatttcggctcgtcgggcgtcaagcggctgatgctgcgcgtggcgccgctggagaagctctgaggtaaccacccaccggcggcttcgcaccatcctcccgccagcgggaggatggtggtgggaccgtaccggcggatgaccggcgcatatatgaaaagcgttgaaaagtcaaggcttgtgtttcccggaaacggttgacataatcatcgatgtccatcttcaaccgagaggagacaacaatgttccgtagactattcgcatcgctgccggccatcgtgttcggcgtgcttatcgccgtcgccccgcaggcattcgcccatgtgtgcgaggtcaaggataatatgcccatggcgtgccattacaccgcgcaagcggagcttggcatcggcgtggtcatcgccctgctgggtatcatcgctttgttctgcagcccgaagatacgtacaggtctcaatatcgccgtcgctttgaacgcactgctgtcgctggccgtgccgacggtgctgatcggcgtgtgcaagggcgccatgatgcattgccatatggtcaccaggccgacgctcatcgtgatcggcattctggcactgctgttcgccgtcgtcgccgtctaccttgactccaggcccgtcaagcgatgatcacaagaatcaccctcaaacgactgccgctggagaacctgaagcgcaagccgtttcgcacggctgcgctcgtcatcgtcgtcatgatgctgacgctcgcgttcttcggcggctcgctgctgtccatgaacctgcgcaatggattgcgcagcatgcaggaacgcatgggagccgacctcatggtggtgccgcaggataccggcgccaaagccgaggccctgctcaccaacggcggatccaacacgttctatttcaccaacgacgtcgagaacctggtctccaaggccgatggcatctcccaagtcacggcccagacgtacatatcatcgctcgcggccgcatgctgcgacgagaaggtgcagatcataggcttcaaccccgcgaccgacttcgtcatcaccccctggatcacatcgcagttcgacgggacgctgaaagacggagaagtcgtagccggctcgaacatcagcgtatccggcaacaacacgatcaagctgtacgggcatgagttcccggtcgccgcccagctcggctcgaccggcaccagcctggacaattcggtgttcgtcaatatgtccaccatcccctcgatcgtctcgtactcgtcgtcggtgggacacacggccatccccgccgaatacgccgacaaggcggtctccgcgatcctcatcaaggtcaaggacgggtatgacgccaagcaggtctcgctcaacatcaccaaggaatccggtctcgaagggctcggattcgtgtatccgggcggcgtgacagccactaccaagaccaacctcgacgcgctggtcgggtacgtcacgctgttcgtcgcagtgttctggatcatgggcctcatcgtgctgctggcagtgttcgcatccgcgatgaacgagcggaagaaggaattcgcggcctaccgcatcatgggcgccacgcgcggcacactgattgcgctcatcgtcaaggaatcggcgctgatcggactggtcggtggcgtcatcggcatcgcgggcgcgtctctggcggtgttcccgttcaacacgctgatcagcaggcagctgcagctgccatacctgcagaccgacgcgctcaaggtcgtcgcgctcgtcgccataagcctcgtgttcgccgtcgcgaccggactgctggcgtcaatcgtcaccgcggtcaagctgtccgcgcccgaaacctatctcacgttgcgcgagggggagtgattcatcatggcgatgcttgagatcaatgatctgacccgtgaattcacccggcgcggcgcgcgtttcgccgccgtcgaccacgtgagcttctccatggaccagggcgaactggtcgccatcatcggacgttccggcaacggcaaaagcacgctgctcaatctgatcgctggcctgctcaagccgacgtccggcaccgtcgagatcgacggccgaaacgtctccaagctgtcggacaaggagctctcgcagctgcgcaacgcgacgctcgggttcgtcacgcaggggcagacgctgctcggcaacctcaccgtgctcgacaacgtcattcttccggccgtgctgtttgacccggcgaagaaaacggtggtgccggatgatgttgcggcgcccggcgaagccgatgccgccggcgcggccgattccgcacgtgagcaggacgatgccgacatgcccgacgtcatcgacgatgatctcacggcggagcacgagcccgacgccctggagctacgggcgatgctgctgctggatcgactcggcgtggctgacctgtccgacagctatcccaaggagctgtcgggtggcgagatgcgccgcgtctccatcgcccgggcgctcatgaacgggccgaagctgctgatcctcgacgagccgaccggcgatctcgacgcgacgagcaccacgatggtcatgcgtctgctgcgcaacgtcgccgatgagacggcggcggtgcttatcgtgacccatgacggcgacacgttgccatacgccgaccgcgtgtacgccatggacgcggggcggctcaccccggacggcggagcctgacacgcagggtcgtccatagggtatgcgattataaacgattgtgtctgccataaggcggatgctatctggagtcttagcccatcagtgggtcggcggcggttttccgccgttcgtgcacgtcacgacgaagcactggggaggccgactcagcgcggggacagcctcgcgttccgttcagataacgacagaataaaggaacaagaatgaccaacgttcagcgttctcgccgtcaggtgcgcctttcccgcgccctcggcatcgcactgacccccaaggctcagcgcatcttcgaaaagcgcccgtacgctcccggtgagcacggccgcacccgtcgtcgcaccgaatccgattacgcggttcgtctgcgcgagaagcagcgcctgcgcgcccagtacggcgtctccgagaagcagcttcgctccgcttacgagaaggcgacccgcaccgccggccagaccggtaacgcgatgctcaccgatctcgaagtccgtcttgacaacctcgtgctgcgtgccggcatcgcccgtaccactgctcaggcccgtcagttcgtggtgcaccgtcacatcctcgtcgacggcaacatcgtggatcgtccgtcctaccgtgtcaagcccggccagaccatccaggtgagggccaagagccagaccatggttccgttccagatcgccgccgaaggcgtgcaccgcgatgtgctgccgcccgtccccggctacctcgacgtgaacctggcttccctgaaggccaccctgacccgcaagcctgaagtcgaggagatcccggttcaggtcaacatccagtacgtcgtcgagttctacgctcgctgatctggatccaccacctgtaatttacagcgtaaggacatacatacacacgaacgccccgtggcattgcgcccggggcgttcgtgtattccggtcctgttctcacgggttcgaccggccatcggccgcgttcatcgtcactggccgcacaccgcctgccgcagcatcgtcgcatacgcataagcgccggtcatgttgggatggatgccgtcgtcgtacaggtattcgccgtggccctcgctgtacttgtaccagtcgatgatgcccacattgccgttgtggctggctgcggcacgcatcatcgagttgttgttcttctcctggttcggatagggcatacggatcgtcacgaaatacaccggcttgccgcccgcaaggtcgatcagctgctggaccacctgttcgttgcggatgatgccgttcgttccgagcccgtaaatgatgacgctgccgctgtgcccggcagtggtcgcctgttggaacacgctgacggcctgaggcatctgacggttcggcttgccattgatgtatccgttcggaaacgccgcctggatcgcatccttcgtgccggaggtgacggaatcgccgatcatcatgatgtcggcgttgcagcttcctgtattggggtcatagtggtatttcgaagcatccaggttgtcgggcaccttctccgcaatgggcgcgacagatggagacgccggctttgcgctgtctccgttccgctcggagccgtcgtcattcgtctgattcgtcgtggcattgttactcgtcgtaccgtcgtccgagggcttttcgatgctcttcggcttgggcagggcgagaggcttcgccggctcggcgagttcgggccggagttggatcatgcggtcgtgggcgatctgctcccaattcaccggcgcccaagtgagcgcggccacggtgacgatgccgagagccgccatcacccatgaccccggcctcagccgtccgctcggcaccaccgatgccctcgcatgcctgctgcgcggcgtcggctcgtacatgcgagaggcctcgaccagctggtagaacgcctccgtcgccgtccatatcacggccgcctcaatcagccatccccaccacggcagtgcttcggtgcgggtggcgggattcatgaactgcagcagcgggtaatgcatgagatacagcgaatacgagcgtgaccctaggtaacgcagcggagcgcagccgagcacacgcggcaggctcactcctctgatggcgccggcgagggccaaggcgcccaatatggcggcgacaaggtacccgccgtgatacatcgtgtcgtcatagccgttcatgaaccagaaaccggcgcatagggccagcaacgacagccagccgaacacgtccaggatgatagcggacgcgccgcgaccgtcgtctctctgtttgcgatcgtcagcggtccggtcggcacgctgcatcagcatcgccagcatcgcccccatcgccagctccgcgagcctcgtatccgtaccgtaatacacgcgcgacgtgtcgtcgggatcgaacagcagccacatcgccgcgctcgacgcaagcacgattatcaccatcacgacggtccgagcccatttggcgcgaacgagacggccgatcgccatgatcagcagcggccatacgagatagaactgcatgaccagcgcaaggaaccacaggtgcgtcagaggggaggggagtccggccgccgcgaaatagggaagtttgcggaagatgttcacccagttgctggcgaacagcgcgcctggaagcgcgtcggtgcgcaccttgtcgagaaggctcggggcgaacagccatgcgaacggagcggtcagggcgattgtggccagtgttgccggccacagcctcttgatccggcgccccagataccttccatactggaacgtgccatggctgtccactgcgcgaatcaccgaacgagtcgctaggaagccggtgatcacgaagaacatggtgacaccgatgaaaccaccctcaagcagcgatgggcgggtgtggaatgcgaccacgccgagtatcgccacggcacgcaggccgtcgatgccgtcgaaacggatttgccgctggctgtcaggcagccccttctgttcttgctctctcatgtggcctagtctacttcaccgcgggtttcatggctatagttgtgacctgaacccgcgttcgcgttcattggtgttcttgcgcttgtgtttacctgtgttcatatgtgttcatccggcgaaagtcccgtttgcgcgtcgccggatgggactttcgcggggaaggcgtggggatgattccccgccgatcgtcatccggctatcgcctgtaccacaccatgcgttttttgacggttttggggctggtgtggccaagggcggttccgggcccattcaccggtcattggaaaatggcggtttccgcgacctgtgctttgccacaccacgtgatgtgaaggctcacatcgcatggtgtggctctctgctgtgccacaccatgcgattttggggtgtttttcgcctggtgtggcacacgggatgggagcgaatcagccggacggatgggtagggactgagtgcgggctgttccattgagctgagaaccacccccagtcatgccgcgcatgccagcccccccgccagcgggggcgttagcagactggaggggtctgtggcgatgggcgcggcgggttttgtggcatgcgggaagcgtggaataatcgtcggtatgattctccatctgcatcttgtccgccacggacagaccacgttcaacaggtataaccgacttcagggatggtgcaatgcgccgctgaccgaagcggggttggcggacgccgacaaggcggcggaaaaactcaagtacgtgcggtttgctgccgcgtactgctccgatacgtcgcgtgcgcagatcaccgcgaagcgcatcctcgacgtgaacgaggaggtcggcaacgcccggccggtgctcgtgtcggacatgcatttccgcgagcagtgctacggctatttcgaaggtcaggacatgtcgctcgcctggacggccgcgggagggccccacggcgcgaaggactacaacgacatcgtcgccaagtacggcctcgccgcgacccgcgacttcctcaaggaggccgacccgttccacgacgcggaatccgacgccgaatactgggcccgcgtgcacggggcgttttccctgatcgcgtccaacccggatctcaaggacggcgacgacgtgctgcagatatcccatggcaatacgctgctcagcctcatgcaccgcttcgcgccggaagggtatgacctgagcgagaggccggccaacgggtcggttacgtgccttgatttcgatacgaccaagccgttcgaagtggctctcaccgtcgtgtcatacaatcagtgagacgcgcgaccgggccggccgacccgcatgccgccggcagcgtcggtctcgggtgacggctagtgtgttgcgggtattgtgtgcacgggcgtatgcctgtgggacggaaaagaggtacacatgggtgttggccagatcgccggccttatcgcggcaatagcgttcgccgtgcttgcgggcttcatgatctatccgttgattcgcctcggcaagctgttcgaccagattgcggacaccgtgcgtgagtcgggggagcacgccatcccggccctcgatgagggcgtcaccaccgtcaagcaggtcaacaaatcgcttgaggatgtcaacaggatctccgcggccgcgtcgtccactgccaacaacgtaggcgccctgaccgatctttacggttcgttcctcggcaagcccgtcatcaagatcgcgtcgttcttctatgcgctgaaatccaccgcgcagtcgttcgtcgccaagaagagcaccggccgtgactccgtcgaaggctccggacagcaggaaagcaaggctcagtgatgttcaaacgattgttctggatcggtgtcggcgtgaccgtcggcgccctagccgtcatcaaagcccaggcctacgtcaaggccaacacccctgacgccgcacgagcgttcgtgttcggtccggatcaggaccatgtgggcatgaggacgctggaaggcctggtcaacgagttcaacgccacccgccgagcccgcgaggctgagctcaaccaacattacatcgaccgcgccgcgcggtagcgaatccggggcatgcccccactttcacacgcataacagctgtttaaatttttatctatcattttgcatgcgggccagcacggccccaacccacaagggagctcaccaactcatgcgcacttcagaaatcgcgaagcgctatctggattacttctccaagcacgaccatctggtcatgccttcggcgtcactgatctcgccgaacccgaccacgctgttcaccatcgccggcatggtgccgttcatcccgtacctgctcggcgagcagacccctccccacaagcgcatggcctccaaccaaaagtgcgtgcgcacgctcgacatcgacgaggtcggcaagaccacccgtcacggcaccttcttccagatgctcggcaacttctccttcggcgactacttcaaggaggaggcgatccactacgcctgggagctgctgaccacgccgcagcccgaaggtggttacggcttcgatcccgagaagctgtgggtcaccacgtacaccgatgatgaggaagcccgctcgatctggaagaacgagggcttcgaccccgagcacatgcagatcttcggcatggaagacaacttctggaccaccggcggccccggccccggcggcccctgctccgagatctacgtggaccgcggacccgaatacggcaaggacggcggccccgcggccgacgagacccgtttcatcgagatctgggatctcgtgttcgagaactacgaggtcgacaacgtcaagtccaagaccgacctgcacatcgtcggcgagctcaaccagaagaacatcgataccggtgccggtctggagcgtctggcctacctgatgcagggcaagcagaacatctacgagaccgacgaggtctacccggtcatcgaagcggctgagcagctttccggccgcaagtacggcgaggacgcggccgcggacgtcaagttccgcgtcgtggccgaccacgtgcgttccgcgctgatgatcatgtccgacggcgtgcgcccgtccaacgtcggccgcggctacgtgctgcgccgactgctgcgccgcaccatccaggccatgcgcgtgctgggcgtcaccgagccggtgatcccgcacctgcttcccgtctccaaggacgcgatggtcgccagctacccggagctcgaaaagacgttccatgacgtctccgaatccgcctacggcgaggaggacgcgttccgccgcacgctcgacaacggcatcgaaatcctcgacgtcgccgtcaacaaggcgaagaagacctccgacccggtcgtctccggcgacgatgcgttcacgctgcacgacacctacggcttcccgatcgagctgacgctggagatggcggccgaccagggcgtcaaggtcgatgaggccaagttccgcgagctgatgagcgagcagaagtcccgcgcccgtgccgatgcgctgaagaagcgccacaacgttgacctgagcgtgtacgacgacttcaagaagacgctcgtgcagcccatcgacttcctcggctacaccgacatgtccgctcgcggccgcgtcctcggcatcatgcaggagggcaaggggtcggttccggccgtcagcgcccccgcgaacgtcgaggtcatcctcgaccgtacgccgttctacgccgaggccggcggccagctcgccgatcagggcgagatcctgtccgacgatggcgcggtgctcgaagtcgacgacgtgcagaagccgatcaaggatctcatcgtccaccagtgccgtctgaccgaaggcacgctggccgtcggcaccgaggtgagcgcgagcatcgatctcgcccgccgcggcgccatcgcccgctcgcacaccgccacgcacatggtccacaaggccctgcgcgaggagctcggcccccatgctacgcagcgtggatccgaggatgcgccgaaccgcctgcgcttcgacttccagtggtcgtcggcaccgagcaaggacgtgatgaacaccgtcgaggcgcgagtcaacgaccgtctgcgcgacaacctgatcgtcaccaccaccgaaatgaagttcgacgacgcgatcgcgctcggcgcgatgcacctgttcggtgagaagtacggcgacgtcgtgcgcgtggtctccatcggcgaggacggctggagccgcgagctgtgcggcggcacccacgtcgaccacgtcggcaagatcggctcgatcaacatcatgtccgaagcctcgatcggctccggcgtgcgccgtgtggatgccgtcgtcggccagggcgcctacgagttcaacgcccgcgagcacgccctggtctcccagctgtccgacaagctcaacgcacgcccggacgagctggcggagcgcgtcaacacgctgctggccaagctcaaggaatccgaccgccgtctggccgccatgtacgaaggccagctggccgcgtccgtgccccagctcgtcgcggccgcgaagacgtccgcggcgcgtgtcaaggtcgctgcgaagaacgtcggccacttcggctcgttcgacgcgctgcgcaagaccgtgatggacgtccgcgcccagctcggcgaggacgcgccggtcgtcgtcgcgcttgccggcgtctccgaggacgacaagccgatggtcgccgtggccacgaacgaggtcgcccgcaagaacggcatcaaggccggcgacctggttcgcggggcatccaagatgctcggcggcggtggcggcggcaagccggacttcgcccagggcggcggctccgacgcgagccgcatcgacgaggcgctgaaggcacttgaggccgaggcgctgaagggctgaaccatccggtggtatggctaggcgttgatttgggcgacgccagggtcgggctcgcattgtccgaccctgagctcacctttgcccatccctatggcaacatccaggcatacggcgattcgttccgtgcgctggatgacgtcattaccgtcatcgaggacgaagcggtggaccacattgtggtgggactgccgcttcaacttgacggcaccgaaggaaaaagcgcgaagaaggctcgccgttggagcgcgaacctggaaaagcgcatgcgcaacttgatggatgaacacgatttcgcgttgtaccacattcctcaggtaacattattggatgaacggctgaccacggtcagcgcgcatcggcaattgctggaagcacaactcgggtcccgccgtcatcgtccggtggtcgatcagcaatcagctgtcgtgatattgcagaccgcgctggacggcgccatgaaagtgtgaggagagagctagtgtcagatgacctcgccgattttttcgaggagaacacccattgggtcgactccaaaggcaacaccacgtcggtaaagccccccaaaccgccgaaatcacggcgtgaaatgcgccgtcggcgcaatgtccgccgccgcaagaccatcatcgtgctgaccatggtcgtcgcggtgctcgtcgtggtcatagccggcgggttcttcggagtcagggcgttgcgcgccatcagggaccgcaacgacggcgacacctactccgtgcaggactacagcggtcagggatacgggtccgtggagttcaccgtctcgcagggcgagagcccgtccagcatcgccaagcgtctcgtcgaggccgaagtggtcaagtccgcggacgcgttcaccggtgtctcatcgggtatgacgctgtacccgggcacctatcagctgcgcaagcacatgcccgcgtcgtccgtggcggcgatcctgtccgatcagagcaaggcggagggcttcctcgacgtcaacgcgggggagcgggtgtccgacgtcatcaagaaggccgcggcgctcagcgagatcgacgaatccgaattccagaagatcatcgacgccaaaggcgagggaatactgcccgcggaagccggcggcaacttcgagggatggctggaacccggcaagtacgacgtcaagggactcggctccgcgcagaagatcctgaagaccatcgtcgacaagcgcgtctccaagctcaacgagatgcacgtgcccaccggcaacgagcggcagcggctgctgatcatcgcctccatcgcggaggccgaggtcaattcgtccgattactacggcaaggtgacccgcgtcatcctcaaccgtctcgaccgcgacatgacgctgggcatggattcgaccaccgcgtacggtctgggcatcaacggcacgcagctgaccaacgcgcagctcaacgactcgtcgaacaaatacaacacgcgcgtcaacaagggactcacccccacgcccatcagcaatccgggagacagcgccatccaggcggcgatgaacccggagcagggtgactggctgtatttcgtcaccgtgaacctgagtaccggcgagacgaaattcaccaccggctccgtcgaggagcagaacgcgcagttcgagcagtacgtcaaggaatacaaggacaacaacaagagcgcgaactaaagcagcgtcgtcgcgatgaccgcgaccaccgccgcgcagacgatcgcgggtgcgaacgggaccttgcccgcatggtcggatcggcgctggggatcgaaccttagccacagcgccatccatgccaatcccagcagacccatggccagccaccagaccaccacggcggtcagcccggccatccccacggccaggcccatggccagcgtgcaggtcacgtcgccgaaccccatcgatccgggcttgaccatcgccagcccggcctgcagcacggcactgagcacggcgaacagaggggcctgcaccagcaggaacatcgtgttcgccatgacggcgacgatgatgaccgccaccagctgtgccaggcacccgatggcgatccacaggcgcggcacacgccggcgccgaatgtcctcgacactcacggcgataccacatatcaagctgggaaggtatgcaaggtaggtcatgacataagatatagcgaagttaccgattgaatcaaaggagcatggcatgttgcgctggcagacggcgggggaatcacacggcgaggcgctggtcgcgatgatcgaggggttgcctgcgggcgttcgggtcaccagcgatgacgttgtcgatgcattggcgagacggcgcctgggatacgggcgcggcgcgcgcatgaagttcgagcaggataaggtgcgtctgctcaccggcgtgcgtttcggcgagaccctgggatcaccggtggccatcgagatcgcgaacaccgaatggccgaaatggaccgaggtgatgagcgcggatccactcgaccacgatctgccgcgtgaggggcgcaacgccccgctgagcaggccgcggccgggacacgccgacctcaccggcatgcgcaaatacgggttcgacgacgcgagacccgtgctggagcgctccagcgcgcgcgagaccgcgtcccgcgtggcgctgggcgcggtcgccgcgcggttccttgagcaggcgttcggcattcgcaccgtgtcgcatgtgatctccatcggaggggcgggcgtcgaggacgccgatgacgtagcgttgccgacccccgacgacgtcgaagcgctggacgcatccccggtgcgtacgctggacaaggcggccgaggagaggatgatcgcgcgcatcgacgagatcaagtccaccgccgataccgtcggcggcgtgatcgaagtgctcgcatacggcgtgcccgccggcatcggcacctacgtcgaatcggatcgccggctcgacgctgccttggcctcggcggtcatgggcatccaggccatcaagggcgtggagatcggcgacgggttcctggaggccgtgcgccccggatcgcaggcgcatgacgagatggtccccggcgcagatgggcgcatcacgcgactgaccaaccgtgcgggcggcatcgaaggcggcatgtcgaacggccagccgattcgcgtacgggccgcgatgaagccgatcccctcgattccgcgcgcccttcgcacggtcgacgtcaccgacggcgaggccgcatccgccatcaaccagcgttccgacaccacggccgtgcctgcggcctccgtcgtggccgaggccatggtccggctcaccctggcgcgatacgcccttgacaagttcggcggagacagcgtagtggagacgcgccgcaacttcgagcagtacgtcgcctcctggccggagcacatgcgctgacggcgcggtaacgtcatccgcaacgaaccgtacgtcctgaaccaagggagagaaatcatgcccactcgaccagtcgccgtcatcatcggtatgatgggcgccgggaagacccgtgtcggcaaggaggtcgcgcagctgatgtcgctgccgttcgcggatgccgacgtcgaaatcgagcacgaggtcggcatgcgcatccccgaatatttcgagcgtcacggcgaacccgcgttccgtgaggtcgaatccgaggtcatcgccgggatgctgcacgggttcggaggcgtcttcgccctgggcggcggcgctccgatgacgcccgcggtgcaggacgatctcaaggaatacatcgaggacggcggcaaggtcgtgtatctcatggccgacccgcgcgaggccatggaacgggcccatcgcggtggcggccggccgatgctgcagggggacgccaatgcccgctggaagaagctgtaccgccagcgcgacccagtgtactaccgggtggcgaacgtccatgtcgaaacatacgggcagacgccgctcgccgcggcgaggaagatgatggatatgattaccgaacgaacggttcatgtgaccggcgcgaccatcgaggattatgacgtgagcatcggggaaggggcgatgaaccacctctccgaggtgctggggccgaagccggtccggatagccctgatccacacgcagccggtgcagcgtcattccgaccgtgcccgcacgctgctgcgacaaggcggctaccaggtgtcggacatcgtgatccccgacgccgaagcgggcaagacgatcgaggtcgccaacggcatctggcagcggctcggcgacgagggcttcacacgctccgacgccgtggtgggcgtcggcggaggcgccgccacggatctggccggtttcgtggccgccacatggatgcgcggcgtgcggtacgtcaattgccccacgtcgctgctcgccatggtggacgcctctacgggcggcaagaccggcatcaacacgccgcagggcaagaacctcgtcgggtcgttctacacgcctgccggcgtgctcgccgacctcaagacactcgtctcgctgcccaacgacatcttcatcgaagggctgggcgaggtcgccaaatcgggattcatcaaggaccccgaaatcctgcacatccttgaagagcatgcggccgaacttcgcgcattcgacggggctacgttccttggcagcggtctggagaacgtggtcgccgagctgatcgagcgcacggtccgggtcaaggcgtaccacgtctccgcggacctcaaggaagcgggcctgcgtgaattcctcaactacggccatacactcgcccacgccatcgaaaaacttgagcatttccgctggcgccacggcaacgcggtcgcggtcggatgcgtgtatgcggcggaattgggtcatctgctgggctatatcgaccaggatctggtcgattatcaccgctctctgcttggctcgctcggtctgccgacctcatggaacggcggcacgttcgacgaagtgctggcgctgatgcaccgcgacaagaaggctcgtggcaacaagctgcggttcgtcgtgctcgattcgatcggccatccggtgcatctggacgatccgccggcggacgcggtcgaggaggcgttcagacgtatccaggcgtgacgacgccggaccggtctccacatgaccggtccgagtcgtgttttcgcccaccccagcaatatcaatcatcagccaaaggaaagtgcatcatgaccaaggtgatagtcgtcaacggaccgaatctgggccgcctcggagtgcgtcagccggacgtctacggcaggcaggatcttgagacgctgcgcacgcaatgctcccagtggggcgccgcgctcgggctgaaggtcgaggtgcgccagaccgacgacgaggccgagatggtgcgctggatgcatcaggccgtcgacgagcagaccccggtggtgatgaacccggccgcattcacgcattactcgtacgcgctggccgacgccgcgcacatggtgggcgatgccggactgccgctgatagaggtgcacatctccaatccctccgcccgtgatgagttccgcaagcgttcggtcatcagcccggtcgccaccggcaccatcacgggaatgggattctacgggtacaagctcgcgctggacgccatcgcgcatcttatcggctgatccgcagtcgcagaaccgtttcaacgggtggtcatcattgctggtgcgcttgcgcgtcgggcttgctgcgcctagtgtggtgtccatgaacgatgaagcgaatcaggggtacccgcaaggtccggccaatggcggttatccgaacggtgcatcgctttacggggttcagggcgatgcacacaacggcaacaacgattatccgcagtatggagctgcttcgcagcccggggagcatcagcccggttacccgcaacatgactcctggcagggtcagggcggctacgccggcggccagcgtccgccggcaggcgggcagcccgtctatcctccggtgggagcaggccaacggcagcagccatacgccggcggctatccgcagcagggtgcgtatcagcgtactccgtaccagccgtacggtcagcctccgaagaagaacaacacgggcaagatcatcgccatcgtcgtctccatcgtcgtcgcgttggccctgatcggcgtgctggtttgggcgttgacgtccaagggaggcgacggcaaggacggcaagggcaccgaaacgtcgcagacgacgaacggcggttcgaacaacaagaacaacgatggctacatcgaggttccgcgcggcgactcgaacggaaactccggcgacgactcctacgactccatcaacaaggactaccagcagaagaagcaggagctggacaaaaagaagcaggagctgcagcaggaactcgacaactacaagaagaagtacggcggctcaagctcgtatgacaaccagaattcgtacgattcgtatggcgactcctatgattcgtacggtgattcctacgattcgacgggctactgatccgcgtcgaacgaggtgtcggccggctcgacgcggctgaccgcgttcgaccggtagattgtgtgacgcgggcatcatccctgacggcgcatgccgtcttcggtatgatgcccggtccatttgagcaccgcctggacgcggttttcggcgttgagcttctgcatggatgactgcgcgtgcttgcgcacggtggccgctttaatgccgagtcgtttcgctatcgataggtcggtcagcccacgcgacataagatcgagcacctgcacttcgcggttggagaccaggtcagcccgtttcggcgtctcatgcgcgagctggtcgaatgaggcacgggcgtcaacgaacccgaaatcaccgtaaacgcctccgccaagtactgtcgccaagccttcgagtatttcctgctcgtcgttcttgctgaccagtccttgggcgccggcctgcgccacgtcgaatccgaacgtctccttggcgaacgaggtcatggccagaagcttcaccatgctgtcgcgtcggcggatacgacggcataccatgacgcccgacatggattccatcgacaggtcgaccaggaccagatctggtctcgtccgggcgtccagcgtcaggctcacggcgcgcggcccgtcgatgaccgaccaggctatgcgcagtccaggtgtcatttcgagaacgagacgctccagcgaatccaatgaccgcctgtcatcatcaaccatgccgattgtcccagtcaggtcatcgaaaatccccatacaatcacatacctcatcatatgctttcaggtttccccccatagtaacccccttatatacccccgtcaaaatcaacgggtgttgcatccatgcccccatgtttgatgccaggatatgagggtgcattgttgctgtaagcctcatcctgccaaagtcccatttgatggtgtcgggatggggctttggcgggatgaggcagaggccgttgttcgtgtggcatggcgggatatgaggctattggtacgattccgtaacagcctttgaagttccgtgccgattgcgtgtgtgaacgtcacgaggggaatcgtcgttgccgggatcgtcggcatgaagcccatatatcgggatcgatcgtcttgcggtgcatcctgcggttccggggcctccgacgggcagactggtgtcgtgtagcaggccggcaccgcgccgcagcgtctctgcgtcagagctctggcggatgggcaagtcagtcgatatggtcgggatcagtatcctgccgatgaccgtgcccgaatctccggagccgttctgttgctcggcatccggttgcccgagatcgtattgtcctgaatcaatgagcctccggttgtatgcctgtgcttcgtcaaccgtcattccggtttcgttcgtcatgccggtttcgtttcgaggcgacgattgcatggaggacgcggttctccatgccgtgtcgccgacgacatcgaatccggtcactgtaccgccggcatgcctgacatcgtcatatcggccgatgcgcgtcaccgtgaacgcatgacccgcaagcgtgagattctccccggcgcgaagcgtgatgccgctcgtcgctgcatgcgcgggctccgagcgcaacgcgctgatggacatgacctgcggcaacatggccaacgccgccatgaccgcgaccgccgcagcccgcagtccgagacggccggcgagccgttgcgcgggcggcggcccgatcatgccgcacaggaatccgtcataggcagatgatatagtgaaattccatggttagaagacaacatggcaattctcaagaacacatcaccaagcacattttcgttaccggtggcgtggtctcatccctcggaaaaggcctgaccgcctcctcgctcggtcgtctgctgcgcagccgcggcatccatgtgctgcagcagaagctcgacccgtacatcaacgtcgatccgggcaccatgaacccgttccagcacggcgaggtctatgtgaccgaagacggtgccgagaccgatctcgacatcggccactacgagcgcttcctcgacgtgttcctctcccagaaggccaacgtcaccaccgggcagatttatcaggaggtgctgcgcaaggaacgcgcgggggagtacctcggccagtgcgtgcaggtcatcccgcacatcaccaacgagatcaagtcccgcatgcgcgcccaggcgagcgatgatgtcgacgtgatcatcaccgaaatcggcggcacggtcggcgacatcgaatcccagccgttcctggaggcggcccgtgaggtgcgtcgcgacctcggcgccgagaactgcatgttcgtgcacgtctccctggtgccctacatctccgccgcgcacgagctcaagaccaagccgacccagcactccgtgatgatgctgcgccagctcggcatttccccggatgcgctggtgctgcgttccgaccgcccgctcaacaagtccatcaaggacaagatctccctgatgtgcgacgtggatgaggagggcgtggtcaactgcgtggacgcgccgagcatctacgacgtgccgcgcatcctgttcgacgagggccttgacgcctacgtggtgcgcgagctggggctgccgttccacgacgtcgactgggacgagtgggctgacctgctggagcgcgtgcaccaccccaagcacgaggtcaacgtggcgatcgtcggcaagtacatcgacctgccggacgcctacctgtccgtcaccgaggccatcaaggccggcggcttcgccaactgggccaaggtcaacgtcaagtgggtcgccgccgacaagtgcgagaccgaggaaggcgcggccgccgcgcttgaccaggtcgacggcatcgtcatccccggcggtttcggcatccgcggcatcgacggcaagatcggcgcgctcaagtacgcgcgcgaaaacaagctgcctgctctcggcctgtgcctcggcctgcagtccatggtcatcgaatactctcgccacgtgctgggcatcgaggacgcgaactcctccgagttcgagcccgactgctccaacccggtcatcgccacgatggaggagcagaaggacatcgtcgccggccacggcgacatgggccacaccatgcgtctgggcagctacccggccgagctggaggaggactccctcgttgcgcagctgtacggcaccacgcatgtcaccgagcgtcaccgccaccgctatgaggtgaacgtggcctacaaggatctcctgcgcgaggggggcctgcgcatttccggtcagagcccggacggcgagctcaccgagttcgtcgagctgccgcaggatgtgcacccgttctatgtcggcacccaggctcacccggagttcaagtcccgcccgaccaagccccaccctctgttcgcggggctcgtcaaggccgcgctggatcatcaggaagcccgtcaggcctgagcgtgtggctttaagagtagactgatacgcgacgatggggatgcccgaaagggcatccccatcgttgtttagtgccggtccggcgatcattgcgaagaaatcgcaatataagcaagctcacgttttgcgctaagccaacatgcgggtctgctgtggagttcgccgtgaggttctgctaacttaacgtaggaactatgtgatgaataggaggcagcgtcaaggtgagcgacacccagcaggcgcccaacgccgcgtccgacgtggagatgagccagtatgtggccgatcgccagcgtgtggacgaagagaaactcaaaaaggatgacgagatcatccagcaattcggtgattacacctacggctggcatgattccgacgcggccggcgaggccgcgaagcgcggcatcgatgaacaggtcgtgcgtgacatcagcgcggacaagggcgagccgcagtggatgctcgacatgcgtctgcgcggattcaaggcgttccttgagaagccgatgcccgattggggcgtggacctgagcggattcaacgccgacgacttcaagtactacgtcaagccgatcgacaagcaggccaagacgtgggaggagctgccggacgacatccgctccacctacgaccgactgggcatccccgaggccgagaaaagccgtctggtctccggcgtggccgcgcagtacgagtccgaagtgatttacaactccatccagaaggacctcgccgaccagggcgtgatcttcgtggacaccgataccgccgtgcgcgaataccccgacctggtgaagaagtacttcggcaccgtcgtgagccccgaagacaacaagttcggcgccctcaacactgccgcatggtccggtggctcgttcgtgtacgtgccgaagggcgtgcacgtggacatcccgctacaggcctacttccgcatcaacacgccggccatgggccagttcgagcgtacgctgatcatcgccgacgaaggctcctacgtgcactacgtcgagggctgcaccgccccgatctggtccgaggactcgctgcacgccgccatcgtcgagatcatcgtcgagaagcatgcgcgcgtgcgctacaccaccgtgcagaactggtcgaacaacgtctacaacctcgtcacccagcgcgcctacgtgcgcgagggcggcacgatggaatgggttgacggcaacatcggctccaaggccacgatgaagtacccggcgtgcattctcgccgagccgtacgccaaggccgagaccatgtccctcggcttcgccggcaagggccagtatcaggacaccggcgcgaagatgattcatctcgctccgcacaccagctccacgatcgtcgccaagtcgatttcgcgcggcggtggccgctccgcgtaccgcggactggtcaagatcgtcgacggagccgaaggctcgtcgaactccaccgtgtgcgacgccctgctggtggacgacttcagccgttccgacacgtacccgcatgtggacgtgcgtgaggacgacgtgacgatggcccacgaggccacggtctccaaggtctccgaggatcagctgttctatctgatgagccgcggccttgaggagaaggaggccatgggcatgatcgtgcgtggcttcgtcgagccgatcagccgcgagctgccgatggagtacgcgctcgaactgaaccgtttggtcgaactgcagatggaaggatcggtgggctgattcccatggcatcgaacaatactgaaatcaccattcccgtcgcggatccgaacgacccgtacgcggtgccggcggccatgccgtcgagcgccgacagggagccgcgctcgttcgatgtgaacgatttcgccgcgccggagcgcaagcaggacgattggcgctacacgccgctcgaccgcatcggagagttcttcgacgtgttcaagccgagcggggagacgaccatcgcgatcagttacgccgatggcaccgcggtcgacgaaaagcacgtggccgtcagccagtgcgcccttggcgaaggagtctccggcacggtctccaagcccagcgatcgggcggccgccgtcgagtggaattccgggcgtaccgcaacggtgatcgagctgtcgggcgagatcgcccagccggtgctggtcaacgtgatcggcagcggcgacgacctcgatgccctgcatctggtcatctcgacggccgatgaggcccacgccgacgtcatcgtcgagcaccacggtctggcccgtctcgccgaaggcgtggaaatcgtcaccggcaagaactcccacgtctccaccaccttcgtgcaggagtgggagaagggctccaagcacgtcggcaaccagcgcatccacgtcggcgagggcgcatccctgcgccactccgtcgtcacactcggcggcgacgtggtccgtatccgcatggatcaggacttcggcggcgagcagggcgacctcaacatgctcggcatctacttcgtcgaccccggcgagcacatcgaacaccgcacgatggtggtgcacaaccatcccgagtgcaagtcccgtgtggtctacaagggtgcgctcgacggcaaggacgcgcactccacctgggtgggcaatgcgctgatcgcgccgacagcgccgggcaccgactcgtatgagctcaaccgcaacctcgtgctcaccccgggcgcgatcgccgattcggagccgaacctcgaaatcgagaatggcaacatcatcggcgccggacacgcgagctccgtgggccgtttcgacgacgaggaactgttctatctgcagtcgcgaggtatccccgaaacggaggcccgcaagctcgtcgtacgcgggttcttcggagaactcgtcgaagagatcggcgtgccattcatcgccgaacacctgatgaacgtaatcgaccgccgcctcgcccgcggcgaaagcgacgccatgaaagccgtattggaggataagtaacgatggccgaacagcacactctcgaaatcaaggacctctacgcatccgtggagaccaaggagggtcgcaagcagatcctcaaaggcgtgaacctcactgtgcattccggcgagacccacgcgatcatgggccccaacggctcaggcaagtccacgctcgcctacacgctggccggccaccccaagtacgaggtcgactcgggcgaggcgctgctcgacggcgtcgacatcctcaagcagacccccgacctgcgcgccaaggaaggactcttcctcgccatgcagtacccggtcgaggttcctggcgtgtcgatgaccaacttcctgcgcaccgccaagaccgaggtcgacggcaaggcccccgccatccgcacctggaccaaggagctcggcgccgcgatgaagaagctgcgcatggacccgaagttcgcgtcgcgttccgtcaacgaaggtttctccggcggcgagaagaagcgcgccgaagtgctccagctcgaactgctcaagccgaagttcgccatcatggacgagaccgattccggcctcgacgtggacgccctgcgcatcgtgtccgaaggcgtgaaccgcgccaaggagagcaccggactgggcatcctgatggtcacgcactacacgcgcatcctcaagtacatcaagcccgacatcgtgcatgtgttcgcagacggccacttcgtcaagaccggcggtcccgagcttgccgacgaactcgaagagaccggctacgacaagtacctgcccgaaggctccgactccgaatcggctctggcctgatttcttcgttttgttgcgtttgaggtgtggtcgcattgtctgggggtgtactattcccgaccgtaagcttggcccgagcggcctggagcgattccgggaacaggacatccctgcaccccgcggccaccgccggaagcatgatccaccgctggaagcggcgagcgaataagcggataactgaaaaacgacatatcggcaggacattgaatctaaggggaacaatggttgattttacggcgattcgggcgcagttcccgattctggatcagcagatccacgggcatccgctcgtctatctggattccgcggccacctcgcagaagccgcagtgcgtgatcgatgcggagagcgagttctaccgcacgatcaacgccggcgtgcaccgcggggcgcatgagctggcggcccgcagcaccatggcgttcgaggacgcccgcgcgaaggtcgcccgcctggtcggagccaacgccgaggagggcaacgaggagatcgtcgtcaccgccggggccaccgcgggactgaatcttcttgccaccgcgttcggcaacgcgagtctgggccgtgggggagaggcggcgaaacggttcgctctcaagcccggcgacgagatcgtcgtatccaaggccgagcaccattccgtgctgctgccgttccaggagctggcataccacaccggtgccacgctcaaatggttcgatctgaccgaagacggccgcatccgctcggataccgccgatgaggtgatcacggaacacaccaaggtcgtcgctatcacgcacgtgggcaacaccacgggcgccatcaccgacatcgcgcccatcatccgccgtgcccatgaggtcggcgcgatcttcatccttgacgcatgccagtcggtgcctcacctcaaggtcgacttccacgcgcttgacgtcgatttcgccgcgtggagcgcccacaagatgtacggtcccaccggggtgggattcctgtacgggcgccgtgagctgttggaggccctgccgccggcgaacttcggcggttccatggtcgagctcgcgtggatggaccagcccgcgcagtacatggtgcctccggcccgtttcgaggccggtacgcagccggtcgcccaggtggtcgcagccggtgtggccgccgaatggatgatgaacgtggggcttgagaacatcgaggcgcatgagcgcacgatcgccgccgaactgctcaagatgggcgacatcgacggcgtgcggattctcgggccgcgcgagaacgtgaaccgcatcggcacggtggcgttcgacgttgcgggcgtacacccgcatgacgtcgggcagttcatcgacgcgcaaggcatcgccatccgcgtcggccatcactgcgcccagccggtgcaccgccacttcggtctgtatgcgtcgaaccgcgcatcctccggcgtgtacaacagcgtcgacgacgctcacgccctggtcgaggccgtggcgaaggtccgtccgttcttcggactgtgatacgtgtcgcgtttacgccgtttgcgtatgactcccacgggatactgtcacggcatgtggcataatatccacggaatctcacgcggacggcgtttcgcgtgttcgtgaatgatatccgagcgctatcgagcgctatacatgggaagggattgaccgatgggtgatttcggcatgagcggcgacgatcttgagcagatgtatcaggaagtgattcttgaggccgcgcgtgacccgcatggtcgcgagcatttcgcgacggacgtgtccaaggaacagggctccgcgccggccgacacgaccgtgcgcgccagccacgaatactgcacgccgggcgaatcccaccagttcaaccccacttgcggtgacgaggcgacggttcacgccgaggtctccgacagcgagccgcacaccatcgagcgtctggtgtgggacggccacggctgctcgatctcgcaggcgagcctgtccgtcatggttgacctgtgcgctggcaagaccgtcgacgaggcgatggagctgttccgcgacttccatgagctcatggagtcgcgcggcgctggattgcaggacgaggccaaggaggagaagctggaggacgccgtggtgttccagggcgtgtccaagtacccgatgcgcatcaagtgcgcgctgcttggctgggagggcatgcgcgactccgtcgccaaggcgctggcggcgaaataaacggtcaccgcactgccatgagagcggtccgagttgtactcttgatttaacggtttcgcgattaacgactggagagatatgagcgacaatctggttcctgagccgcaggcttccgtgttcgattcggtgagcaaggttctgggcgacgaggaggcggcgcgccgcgtgatggcgaacccgcagcttgcggctgggttccccaacggccgtcctgcccccaaaagcgatggcggcgtcgagatgtgcgcgtgcggccgccatccgaagagcgagtgcgaggatggcgagcacagcagcgaggatgacattccgctcaaggccatcgacgatatcggccgtgccaccgccgaagatgtgaaggaggccctgcatcaggtcatcgacccggagctgggcatcgacgtcatcgacctcggtctggtctacggcatcgagatcgatgagcttggccgcgcgatcatcacgatgacgctgacgacgcccgcatgcccgctgaccgacctcatcgaggacgagtgcgcgagcacgctggcgggtcttgtggaggagttccgcatcgactggacgtggcagcctcgctggacgatggacaagatcacgtccgaggggcgcgagcagctggccgcgctcggtttcaatttcgacaacatgccgaagtactgacctcatgtgtgtctgcggcttctctgtacagccgaagacacgtgaacgaagacacgtgaatatagttgagggggtttgccgcgaatccggcaaaccccctcaacgtatatccgagccgatcagtcgtccacgatggtgcccttcggtacgacggtgatgccttccggcgtcacggtgaagccgcgggcgaggtccttctcggtgtcgatgccaaccgtggagttctcggtcagcacaacgttcttgtcgagaatcgccttgtacacgcgggcgcgacggttgacgatgacgccgtcgaacagcacggagtcgaccacctgggcccacgaatggatgcgcacgttcggcgacagcacggaatgatgcacctcgccgcccgagacgatgacgccgggggagacgatggagtcggtcgcgtggccgagacgatcgcggccggcatgcacgaacttcgcggggggcagcgtgcccgagttcgtgtagatgggccatgcctggttgtagaggttgaactccggcacgtaggcgatcaggtccatgtgagcgtcatagaactgcttgatcgtacccacgtcgcgccagtaggcgtggtcggtcggcgtggagccgggaatgacgttggagttgaagtcgtacacgccggcctcgccgcgcgaggcgaagtacggcgcgatgtcgccgcccatgtcgtgcttggtgtccgcggccttctcgtccttggcgagcgcatcgaacagcgcgtccgtgttggcgacgtagttgcccatcgaagcgaggaacgaattcgggtcgtcgggcaggccttcggtcgtcgccggcttctcctggaattcgcggatcatgttggggtggttcgggtcgacgttgatcacgccgaactggttggactcctcaagcggctggcggatgcctgccacggtgaactccgcacccgattcgatgtgctgctcgaccatctggccgaagtccatgcggtagacgtggtcggcgccgacgatgaccacgatgtcgggctggacgtcctcgatgatgttgatggtctgatagatcgcgtcggccgacccgagataccagtgcttgcccagacgctgctgtgcgggcacaggggagacatagttgccgagcaacgacgagaaacgccacatctgcgagatgtgacggtcaagggaatgcgacttgtactgggtcagcacaatgatatggcggtaatccgaattcaccaggttgctcaaggggaagtcgatcagtctgaatacgccgccgaacggtacggccggctttgcacggtcacgtgtcagcggcatgaggcgcgtgccttcgccgcctgccaggacgatggagagaatcttctgcttgttcttcgccatctgagtgctcctctcgttgttcacagcgtctgatgacaccgtctgcctgtccgcccctgcttcgttgccggagcctacagaaacaataattgcacatttccccgtgagcgcaaggaaatggcgttgcgcgtcatgaaaaagtcatgaaaaatatccgatctgttcttattgttccgcgcgcttcggggatgtcgcgtagaaggcgacggcgctggacgcggcgacgttgaggctgtcgacgccgtgggacatcgggattttcacggtcaggtctgcgcccgcgatggtgtgacgtgacaggccgtcgccttccgtgccgaagatcagcgccagtttgtcgatgtggtccgcggattcgggactgttgttcagccggcgtgtcagctcgtccagcgatatcgagtcgtcgctcagcgccatcgccaccgtggtgaatcccagcgagcgcagttcctccagtcctcggcgcggccagaaatgcttgtcgtcgcctccgatgcgcgtccacggtatctggaagacggtgcccatggacacgcgcgcggcgcgccggtacagcgggtcgccgcacgacggggtgaccagcaccgcgtcgacatccaacgcggccgccgagcgcatcagtgcgcccacgttggtgtggtcgacgatgttctccatgaccgccacgcggcgagcgtcgcggcatgtctcctcgacgctcggcagcggccagcgccgcatcgccgaaagcgcccctcggtggaggcggtatccggtgagctggcgcagttgctcgggggaggccacgtatacggggatgtccgttccccaccgtttgtcgacgacgtcgaaggtctgtgacatgccctcgatccacggctcttcgaccagcagcgagatcggttcgcggcccgcggcgagcgcgcggtcgatgaccttgggcgattcggcgatgaacaggccacgctcgggttcgagccggttgcgcagctggatttcggtgaggttcgtgtatgcggcaacccgctcgtcgtcgatggagtcgatggtgatgaattgcatgggcgtgcctcgggttctcatgtcgtcgtaccgtcgtcggcccgattgcgcgcggccgtctgcgcatacggtatgtatatatggaaagaccccttgtttccaaggggtctttgctggtgtccgggatgggacttgaacccacacgcctgtataaaataggcacaagcacctcaagcttgcgcgtctaccattccgccacccggacaggtgtcgttttctgacaacgagtagacactatatcggtattttcggatgatgccaaatcatggcgtgtcgcctgtgtttgcggggatgttgtagccttgtatccatgactgatcctgtattccttttcgaccctgacaccgatgatgtgccggtgaacggcgatggtctcaacgtggggtggacgatcacgctgccggcctcggtgaagcgccatgccttgggggccatgcgcctcgccgagggcgacgggctgtcgctgaccgacggtcgggggctgtgcgtcaagaccacgctcgtcgacgcgcaggccggtctcgtcagcgtcgagcgcgtcgggcggcagccgcagccggtcacgcggctcgtgctcatccaggcgctggcgaagaccggtcacgacgaggcggccatcgacatggcgacccagatcggcgtcgacgaggtaatcccctggcaggccaatcgttccatcgccaagtggaaggcgggccgtactgatcgcaaatggcggcaggtcctcggcgcggcgaccgagcagtcgcgccgcgtgtggtcgccggaactggcgcagtgcgtctcaagcaagcaggtcgtcgccatctgcaggcgcgcgtgcgtgcatggcgatctggtgatcgtgctgcaccaggacgccaccatgtcatggtcgtccgtggaggacgaggtctcgcggctcgccgaccgttgtctcgccgacgggcggccgcgcagcatcaatgtcgtcgtggggcctgagggcggcatcagcgaggaggaggtgtccgatttcgtcggggccggcgcccagagcgtggtgctcggctcaaacatcctgcgtgcatcgacggcgggcccggtggcgctgtcgctgctgtcgagggcgttggggcgtttcgcgtgaagccgagaatatccttaatacgcaatagcatggaagcagatttccatcacggccagcaaggagcggcgagcatatgagcaagtccgaggactgcctgttctgcaagatcatcgacgggcgcattcccagcgagaaggtatatgaggacgacaccacgtacgcgttcaaggatatcaatcccaaggcgaaggtgcatgtgctgatcgtgcccaaggaccactacgcgaacgtcgccgagctggccgccgccgatcccgcggaactggcccatatcgtcgggctcgcccagggcatcgccgacaaggagttctcgggcgcgtaccgtctggtgttcaacaccggcctcgacgccgggcagaccgtgttccacgtgcacgcgcatgtgctcaccggcgagaagctcgacgagtagggcgattcgtgacaacgacgacccgtaccatcaccatcccgtcgcagcttgacccggtggccgtcttcggcccggtcgacgaggtcatccggcaggtcgagcacgcgttccctgacctgaccatcatcgtacgcggcgacagggtggccatcgtctcccattcgaagtccaccgaatcgcaggcctctcgcgccgaagacgtcatccatacgattatccaggccgcgtacagcgccccgatggacgccgacaccgtgcgcaggctgctcgaccaggacgtgctgcccaacaaggtccgcgccgaacaccccggatacggcaggtccgccgagcggggccgtgcgtcgctcggcgcagcgcgttcaggggatgcgcgcaagcctcgcatacccggcgtcatcactttcgcggccgggcagcccgtgcgtgccaagacggcggggcagatcgcctacgtcaacgccgtggacgcccacaccatcaccttcgcgatcggcccggccggcacgggcaagacctacctcgccgtggccaaggcggtgcgcgcgttccaggacaggcgtattcgccgcatcatcctgacgcgcccggcggtcgaggcgggggagaacctcggtttcctccccggcacgctcaacgacaaggtcgacccttatctgcgcccgctgtatgacgcgctgtccgacatgctcggccccgaccagctgcaccgctatctcgacgacggcaccatcgaggtcgcgccgctcgcgtacatgcgcggacgcacgctcaacgacgcctacgtgattctcgacgaggcgcagaacacgacggaacagcagatgaagatgttcctcacccgtctcggattcaacacgacgatgatcatcaccggagacgtcacgcaggtagacctcgccgtgccgcgatccggtctggccaccatcgagggcattctgggtggcatcgacgacatagcattcgcccacctcgacgccggggacgtggtccgccatgagctggtcgggcgcatcgtcgaggcatacgaccgtcatgacgccacccgtgtcaggcgcaaccgaggcaaggaatcgcgggaggacgcacgatgagcgtggaagtgaccaacgagaccatctgggacatcgacgcaaaggcgttctccgacctgggcctgtgggtgatggaccagatgcgcgtgagtacccagtccgatctgaccatcctgttcgtggatcccgatcccatagccgagctgcatgagcggtggatgtcgctggaaggcccgaccgacgtgatgagcttcccgatggacgagctgaggcccggcgacggcaagaccacgatggagggcgtgctcggcgacctcgtcatatgcccctgggtcgcggcccagcaggcggccgcggcaggtcacagcaccatgcaggagatgatgctgctcaccattcacggcatcctccacctgctcggctacgaccatgtcacgccggagcaggaaaggcagatgttcggtctgcagcggcagctgctgctcacgttcctggccgtgcgccgcatcaccatcgaaccggccacattgccgaagggcgcggccgacgcgcttgccgaatacgacgcgtcgcacggcggcggacggcagataacggaatgacgcgtcttttcccgtcgccgttcggcggcaataccgtcaccggcgctgaacacatgaactcaaacgaaggattcctatgccgttgaccgatacgtccacgattatcctggttgtcgcgttggtcgtcgtcaccgcactgctggtctggctgtcgttgagcatggccgccgcggaaagtgcggtcgggcgcgtcacacgggcaggactgaacaacaagatcctcgaagtgcagaccgacaccgagacgagccagttcatccggatgaagaaaatcggcaagatccataccgtgcagcggctcatcgccaaccggtacgccacctcgggcagctgcgcgttcttccgcatcacatgcaacgtgttcgacggcgtgttggtggcgtgcgtggcgtcgctgcttgatgcgccgatctggctgcagctgctgtgcggcttcctgttcgcgctgatcgtcggcattgtctcggtgctggtccgcccgcggtcggcgggagccagcaagccgatcgacatcatgctcaatttggcgggactggtcaggttcgccaccgcgatcacgccgtttgcgaaggcgggcgagcagaagggtcagaagcgtcgctccaaggaatcggacctgtccgacgacgaggagctggagaagattcagctcgaacaggggcgtgccaccatcgaccgcttggtggaggccaatgatttcgatccggaagtctccgagatgctgcgcaacgtgctgacgttgtcggagacgctgacccgcgagatcatggtgcctcgcaccgacatgatctgcatggaccgcacggccacacttgccgacatgctgcgtctgtgctcccggtccggtttctcccgcgtgccggtgatcggcgacgacgtcgacgatctgatcggcgtggcgtatctcaaggacgccgtgcgcgccacggcgttcaatcccgccgcctcgcagcgctatgtcgcctccatcgtcaggcagccgatgctggttcccgagtcgaagccggtggatgacctgttccacgccatgcagcagacccggcagcatgtggcgattgtcgtcgacgaatacggcggcatcgccggactggtcaccatcgaggacaccatcgagcagatcgtcggcgaacttgaggacgagcacgaccgcacgcagcattccgagcccgagaagatcggcgaacgcaagtggaagatgccggcgaggactcccatcgccacccttgaggagatgttcgagatcgacatcgacgaggacgacgtcgacaccgtatatggcctgctcaccaagctgctgggccgcgtcccgatcgtcggctccagcgcggtgacgcgcggcctgcgcctcaccgccgtcgacacggcaggccgacgcaagagggtgtcgatgatcgtcgtggagccggcggccgggtcgcagggtcccgcagccgacgacgatgagccccgcagcgacgaacaggacggcgagtccgcctccccgcaaggcgaatgacggagccgtccgcccaatgacaaggtgaaccgctaccgtagagaaacaatgaccaaaccgaacgcgaagaaaaggcatgacacgaatatgaccaatactgacgagcaggaatcccagccggcgtaccgttccggattcatagcggttgtcggcagaccgaacgtcggcaagtcgacgctgatcaacgcgctgatcggcaagcaggtggccatcgcctcatcgcgcccggagaccacgcgaaaggcgattcgcggcatcctcaccaccgaccatgcgcagctcgtgctggttgatacgcccggcatccaccgccctcgcacgctgctcggccagcgtctcaacgacatcgtcgaggaatcgctgtcggatatcgacgccatcgcgttcctgctgcccgccgaccaggagatcggccccggcgacaagcgcatcctaagccgtctgcgcaccgatttcgccaccaagggcgaggacgggacgttcgcgtggaaggttccgctgatcgccatcgtcaccaagatcgaccagctgggccgccagcagctcatcgacaagctgatcgagatcaatgagttcgctgacttctccgacatcgtgcccgtcagcgccctgggacacgacaatctcgacgaggtccgccaggtgctgatcgacaacacccctgaggggccgcagatgtacccggacgaccaggtcagtgaggagcgtccggaagacaccatcgccgagctgatccgcggcgcgttcctcgaagagcttgatgacgagctgccccattcgctggccgtcgtcgtggactccatcgaacggcccgaagacaacgagagcgggcagtcatacgaaggcaagatccaggtcatggtctccgtgtacgtggagcgcgactcgcagaagccgatcatcatcggacgcggcgccgagcatctggtgcgcgtcaagaagaagctgcgcaccccggtcaaccgcatcgtcggaggcaaggccaagctcgatctgcatgtcaaggtcgccaagggctggcagtccgaccccaagcagctggagaggctcggcttctgattgcgcgccgcgtgggcgttggcaccgataaaacggcgtgaggcgggtggttcaacaatcgtgttgaaccacccgcctcacgcgtgaaggatgtcgagcgtcacttcttcttggtgtacatctgcgtgttcagcagtgtggcgtaacgccggatgaccttgggtcggatcaccttcatcgatgcggtcagcaggccgttctcctggctgaactcctcgggcaggatgatgaatttacgcaccgattcggcgcgggacacaccctcgttcgcctgatccacccacttctgcacttcggcgcgcactgcggcgttggaggcggcctcctccatcgtcatatcgcggttgaggcccttggattccagccaggggcgcagcgacttctcgtcaagcgtcaccagcgcggagatgaacgggcgcttgtcgccgagcaccagcacctgcgagacgaactcgcagcgctggatgacctcttcgatcgggccgggggcgacgttcttgccgccggcggtgatgatcagatccttcttgcggccggtgatgtacaggaagccgtcgttgtcgagcctgcccaggtcgccggtgcggtaccatccgtcatcggtgaacgagccttcggtcgcctcctcgttcttgtggtacttcgggaacaccgcggtgcccttgacctgaatctcctcgtcctcggcgacacgcagctcgaacccggggaaggcgatgccgacggaaccctgatggtacggcacgccgagcgggttgaacgcgcacggcgcggtcgtctccgtcagtccgtagccctcgtacacgggcacgttcgcgccgcggaagaacgcgagcagttcggggtccagcggggcgccgccggcgacgatccactgggcgcggccgccgagcacgtcgcgcagcgtcttgtagacgatcgggttgaaggcggcgcggcgggtcttggccagcacaccgaccttgcccttggcacccagctccttcatgtagttctgcgcggcgaccaccgcggcggcgaacgccacgcccttcggcccgtggccggccttctgggacgccgcgttgtacaccttctccagcacgcgcggcacgacgatcatcacggacggccgggcgacctgaaggtcggcgatcagcgtcttgataccctgggcgatgtagatcctgatgttgctcgccacgcagatgtagttgatcgcgcgggcgaacgagtgcgcctgcggcaggaacagcagcacggagttcttcttgttgtgcagcaggtccggcatgtagacgggcaggttcagcgcggtcgtgcagtagtgctcgtgcgtcatctccacgcccttgggtgccgccgtggaacccgacgtgtacacgatggagcacaggtcggtcttcttgatcgagtcgatgcgctcgtcgagctcctcgtcactcaccgcggtcccgtacgccttgatctcctccaggccgccggtctcgatgcacaggatggtctccagcgacgggcattcctcgatcgcgccctctgccttgtcgcgcatgtcggcggtcccgacgatcagcagccgcgcgtccgaattgttgacgatgttgcggatctgctcggcggagtcggtgtcgtagatggtggcgagcacgccgccgcaggccatgaccgcagcgtccgtgacatcccacgcgtaggaggtacggcacatgaacgccacgccgtcgcccttcttcagcccgtagtgcagcaggcccttggcgacgctgcggatgtcggcgagcgtctcgttcgctgtgctggtgacccacttgccggagtcgtccttgtaggtgtacagcggctcgtcgcccatgcgttcggcgcggtccgcatagatgtcgtagatggacatgccctcgtcaagtggcgggttgccctcggtcttcgtggtgagcaggcccgtcgtgctgtcgatcagcgtcgtggtcgggtatcctggcccccattcggcggtgttcgggaggctgacctcgccgttcgcggcaagagcgtcgttctccgcgtaatccgggccgttggaggaatcgtcgccgatcgggtgcgcgaagtcacctcccaaacgaagtgccttctgcgtgatattcgcagcttgctgtcttactgaggtgaacaatgacacgtgacgctccttggaggcctgataatgcttaacacataaatattacccgtaaaaacgcctcttttcaccttacggtagcgtaggaaacagcgtcgtgcgggtcgcccgctcgcccgcggccattcgtcaggtgaaacggaacgcgccaaaagtcgattccttcggtacacttgcaacggtaagcaaagaacgcttgagttcgacgaagaaagggctctcatggctgaaacccagaaagccaccgtggtgttcggtgtcctcaacgagacatcgcaggacgaaacccgcgtcgcattgacgccggatatcgtcacacggttgaagaaagcaggtgtgtcctgcctggtgcagagcggcgccggaatcgccgcacaatataccgacgatgattacgccaaggcgggggccgaggtcgtcgccgcggacgatgtgatcgcgtgcgccgacgtgctcggattcgtggaccgtccgtctgccgagacggtcgcgcggctcaaggccggcacgtgggtgatcggcatgctcggctcgttcaccgatgccgcgtatgtggacgccctccaggcggccggtcttgtcggtgtcgcgatggagaagctgcctcgccagctcagctccgcgcagtccatggacgagatgacgtcccagaattcggtcatggggtacaaggccgcgctggtggcggcgaacgcctatggctcgttcttcccgatgatgacgaccgccgccggcacgatccgcccggccaaggtgctgatcctgggcgcgggcatcgccggcctgcaggccatcggcaccgcccgccgtctgggcgccgtggtcaccgcgtacgacgtgcgtcccgcttcgcgcggcgaagtggagtcgctgggcgcgaagttcctcgatctcggtctcgacttctccaaggggcagggcgagggcggatacgcccgccagctcagcgccgaggagcaggccgcccagcagacggccgtcgaccagaaggcagccgggttcgacgtcatcatcaccacggccaaggttcccggccgcaagcctccgatgctgctgaccaaggccggcgtggacggcctcaagcgcggtgccgtcatcgtcgactgcgcggccagcgacctgggcggcaatgtcgagggatcccgcgtcggcacgcaggtgaccgatgggggagtgaccatcatcggtgccccgtatctcgccagcgaggtttccaacaccgcctcgaacctgctcgcccgcaacgtgggcgacgtgctcgcccacttcgtgcatgacggtcgtctgagcatcgacctgaacgaggaacttgacgacgccctcatcgtagccggacgtcccgccgcagaaagcaaggaataatccatggacatcatcgttgccatcacactgttcatactcgcgctgctcatcggtgtcgaggtcatcggcaaggtgcctgccaccctgcatacgccgctgatgtcgggcgccaattccatccacggcatcgtcatcgtcggtgtcgtcatcgtcgccgcgcacgccacctcgctcctggcctgggtgttcatcttcctcgccgccgtgctcggcacgatgaacgtcgtcggcggttacgtggtcaccgaccgcatgctggagatgttcaagtccgacaaatcgaagaagtccgccgacaagaatgaggaggccaagtaatgggtacccttgctgaagtgctgagcaacccgcttggcgtcgttgaatggttcgtgtatctgctggccgccgtgttgttcgtcgtcggcctgcacatgatgaactcgccgaagaccgcgcgcaagggcaacctgatctccgcggccggcatggtcatggcggtggttatggcgttcatcgtgctgttcgtcaccgagatcggcaacggcttcgagcatctcgtcgccgtcgtgctgctgatcgtcggcatcctcatcggcacgatcgtcggcgtgtggagcgcgaagaaggtcaagatgaccgacatgccgcagctcgtctccgtgttcaacacggtcggcggcggcgcggcggccctcgtcgcgctcaacgacatcctcacctccgaggagctgccgacgctggtcgtgctgatcaccgccggactcggcatcatgatcggttccgtcacgttcaccggctcgctgatcgccgccggcaagctgcagggcgtcaagttcctgcgcaagctcaccctccccgcgaagggcgtgtggaacatcggcttcattgtgctcaccgtcgtctcgttcgtcatgctgtgcgtgcagcccgagcagcgtctgctgtggtgcgtgctgaccacggtgttctcgctgtgctacggtctggtgttcgtcatcccgatcggcggcgctgacatgcccgtcgtcatctcggtgcttaacgcctgcactggcaccgccgtcgccatgagcggtctggcgatcaacaacatcgcgctgatcgtcgccggcgcactcgtcggtgcggccggagtcacgctctccctggcgatgtccaaggccatgaaccgtccgctgatgagcgtgctcgccggcggcttcggcggtggtgcctcggccggcggcgacgccgacggccccgagggcacgatgaaggagaccagcgccgatgacgtcgccgtgcagctggtgtacgccgacaaggtcatcttcgtgccgggcttcggtctggcgcaggcccaggcgcagcgcgagctggccgatctgggcgacctgctcaagggtcatggcgttgaggtgtcgtacgcgatccacccggtcgcgggacgtatgcccggtcacatgaacgtgctgctcgccgaggccaacgtgccgtacgaggagctgatcgacctcgacgacatcaacccgcagttcccgtccgccaacgtggccctggtcgtcggcgccaacgacgtgaccaacccggccgcgcgtcgccccggcaccccggtctccggcatgccgattctcgacgtcgacaaggcgcagaacgtggtcgtcatgaagcgcggtcgcggcaagggctatgccggcatcgagaacgagctgtacttcgagcccaacacgcagatgctgttcggcgacgccaaggccggcctgcagtccgtcatcgccgccgtgaaggagctcatctcgtaaccgtcaccgcactcggcccgccgggccgaacggagcgaaacgatatgggagtgggcccgctggaaatccatccagcgggcccactcccatatccatatcggttccgtcggcgcatggtggctgcggccgggaagctgccgtcagagtccgaacacgcgggtgacgaaattcgtcaccgtcttccagtacaccaccggtgccgtgctggcgctcatggaatgacctgccgagggaatcagcagtttctgccggtcgatgctcgcgcaggcgtcgaagttctcgtccaaagccctggacggcacgaaatcgtccgcgccgccgtggatgaacagcatcggaatcgtggcatgcttcagctgttccacgcacgaggcttcctggaaaccgtacccggcacgccgccgcgcgatcgcccccatcgtcgtcacgatcggcttggcgaggaacttcggcaggtgaaacatcgaccgcgcgcagtcgatgaactgctggccgaccgacgcatagccgcaatcctcgaccgccgccacgacgttcctgggcaggtccggctcgccgacggtcatcatgaccgcggccgcgcccatggacttgccctgcagcaggatgcgggcgtccgcgtcgctgccgatgatcagcgatatccaccgcatcaggtcacggcgatccagccatcccatgcccgcatagcggccttcgctgagcccgtggccgcgcagcgccggaaccagcacggtgaacccgagacgggcgaaacgatgcgcgtacttcgccatatcctgcggttgccccgaatacccgtggcagcatatcgcatacaggtggggcttcgcaccggcgcaatcgggatcgaacagccagccatgaagctggatgccgtcctccgccgagatgaccaccggctgcttggactggtcgaaccaatccaccgcctcgacctcttcggccgcgtcgaggcggggtcccttgtccgcgactttgccgtcatccctgccggatctgagcatcgagtgcttcgcctgtgcatccagcgcatacgagaacatgagattcgccagcccgtaagtggcgccggctaccacggaggccgcgattccgcctccaactactatccgtgatgtgttacgcgccattgcaaacctcccagctgattcggtgcatgtcccattgcgtccattgtagggcctcgccggggtcgatgacggcatgacgacgaaacagccgggcggatcgggcgttcgattcgtttgccgggatagacgttccatcgaatgtcccgcgcggccgtataattgtttctcgttgctttggcgagggcattccgattcgcgagaacgggtctgccgtaatcgactcggcgttgaataccacccctccttggggagttctgcggcgcgtcgtggcgtcaaatagacagaacgacaagtaacactcaaggagaaccattatggcaaacaccatcaagatcgccggtgacatccgtgacgaattcggcaagggcgctgcgcgccgcatgcgcgtggccaagctcatccccgccaccttgtacgcgggcggcgaccagccgacgttcgtgaagctcccgatgaaggagaccacgctggccctgcgccacacgaacgcgctgttctcgatctccttcggtggccagaccaagctggccgtcgtcaaggatgtgcagcgcaaccccgtcaagcgcatcgttgaacacatcgacttctacgaggtcaaggccggcgagaagatcgacgtcgaggtgccggtgttcgtcgagggcacgccgaagggtgccgccgtcgcgttcgtcgacctgcaggagctcaaggtccgcgccgatgtcaccaacctgcccgagcgcatcgtggtcaacgttgacggcctgaccgacggcaccaaggtgctgctcaaggacgtcgtgctgccggaaggcgccgagctcgacatggacgatccggagacctccgtcgtcagcgtcgaggtgcctgaggacaccaccgagtccgctgctgccgctccggccgctgacgccgacgccgctgctgccgctccggccgccgatgcggacgccaagtgatccgtctcgcatagcacatcggattcccgcgtgacacacgggagtgacgcttgagaaaagcccaccacaagcgtgggcttttttcataatgtgaacgagctcacgccgaatgcgtcatcggtgtgagaaagtatccctcagagccggtgccagaagcgccgactgccccatctggccgccgtgacgcaaacggcgacgttatcaaagaagtggttatgacagaaaacaatcatcacgattccgccgcgctggacaagctcaccgagccgttcaccgtgctgccgaacgacaatcccgcatccgacgcgaagcgccaggagctcatcgacaagccggcattcggccaggtcttctccgacaacatggcccacatgagctggaccaagggcgagggctggggcgaccgtcgcatcgagccgtacgcgccgctgaagctggatccgggcgcatccgtgctgcactacgcccaggaggtcttcgaaggtctgaaggcataccgccacgccgacggctccacctggctgttccgcccggacgcgaacgccgagcgtttccagaactccgccaagcgcctgtacctgcccgagctgtccgtggacgacttcctcggctccgtggcggccctcgtcaagcgcgacgtcaactgggtgcccacccgccgcgagtacacgctgtacatgcgtccgttcatgttcgcctccgagccgttcctcggcgtgcgtgccccgcacgaggtcgactactgcgtgatcgcctccccgtccggcccgtacttcccgggcggcgtcaagccggtgagcatctgggtggaagacaagtggttccgcaccggccccggcggcaccggcttcgccaagtgcggcggcaactacgccgcctcgctgctcggcgaatacaccggcatcgacaacggctgcgagcaggtgtgcttcgtggacgccgccaccaagacctaccttgaggagctcggcggcatgaacatgatggtcgtgcacaaggacggccacgtggagaccccgtccctgaccggtaacatcctgccgggcgtgacccgccgctccctgatccagctcatgcaggatcgcggcatcgacgtggtcgagacgatgatcaagctcaccgacctgcttgacgacatcaagtccggcgaggtcaccgaggtgttcgcctgcggtaccgccgccatcatcaccccgatcggccgcttcaagtccaaggagttcgacgtgaccgtggccaacggcgaatccggcaagctcacggtcgacctgcgcgaccagctgctcggcatccagctcggcgaggtcgaagacccgcacaactggatgtggaaggtctgctgagcgcagtccagttctacgtgaaaccccgcccatcggctcgatcgagcccggcggggcttttcgtatagaacccgctcccgctggcgggagctgtcgagcgtagcgagactgagggtggtgtttatatgcccataaggattgcctgcggcagctgcgttgccgtcatctgcacgcggccatcggcaaccatgatgactggtggatggacaacaagccggcgctgaacctgttcgagagcatcgaaccgaacggcaccgttgaactggaaggacttggaacggtcaacctgtcgcacttcccatatcgcgaagacctcgcgtacggatggcccgatgacgcggtccgattccacgatcaggcgctgccgttcgacggacgcaagctgctgtacggtcacacgcatcagctgtctcccgcgggtgcgcggccggaatcgctcaacgtcaattctgcgcggactgccgggctccggcaagtcgacatgggcgcagaactgggcgtccgaccccgccaacacgtggccgcattgcgtgatctcactcgacaccggctggaatgtggtcgtcgacgcgcagcatgcgaacccggagtatgcgaatgagctggcgcggctcgccacacggcacggggcaatctggcggacggaggatttcgacgtgcccctggacgagctgctgcgccgcaacgaggcccggccgcgcgccgaccatgtgccggaggaatacatccgctcgtcgtggaagcggttccaccacgtgatgttccgcccgctcaatcccgaagacccgaacggcaacctgcttaaacgcatgatcgccgacctctacgtccgggtcacaccggtgcgcggcgagagcgacgtattcgcctgcaatttcactcgagaggcgttcctcgaaggacgttggaacacacgcacgatcaacgcccgcgggctctgaagtatgacacggtggtcgcgcacggcgacacatccccgggatcattcctcgtgcgcgtggagcgcaaggagaacggcatcgacctgacctatgagcgacaggcgttccaaggaacgcgacatcggatcaaggtcggcgagatcctgacccggatcggagccgattctagtttcgggtagccggcttgcggtaggctcatgtacggccggatggttgtgatgttggcgaggagtggcacgtggaggaactggcactggaaagcaatgcctttttcatgggcatcgaatatcttgcggtgttctgcagcgggctgatgggcggtctatgcgcggttcgcaagaactatgacctgttcgccatgctgatcaccgcgtggctgaccgcgttgggcggcggcatcatccgtgacgtgatgctcggctccctgccgccggtgggcatctccgaccgcgggttcgtgctgaccgcactggtgtcgggcctggctatcgccgtgatccatcctgaagtggacaagctcagatggtcgatgctgaccatcgacgccttggcggtcggcttgttcgcggtgaacggcacctcgaaggcgctcgatttgggaacctccggcatgacggcggtgttcatgggcatgttcaccgcgctgggcggcggtctggtccgggacatgctcctgaacgacgtgccaatgatcatccgcgacaagcacctgtacgcggttccttccgcggtcggatgcgtgctcaccgtgttcgtgtgcaggggagtgcaatggaagatgctggatttcacggccgaggtggtgctcgactgcgcgatcgtcgtgctggtcgtggtcatgcgtctgctgtcggtcaagttcagcatcatgcttcccggcgcggtcaagcggcacaacacgtatcttcccagcgagtcgcggtatctgaaacgcccggtcatccatcccgatgcccacgatggcggcgatgacgacaaagaccagtctcgggattgacgctttcggaccacccccacccgcttcgcgggagcccccgctggcgggtgggggtggccggctaacacgaaagaacccccgggaaccttgcggttccgcgggggtcttatgctgtgacgaccgtcagacggtcatgctcacatgttgttgatggcgactgccatgcccgacttgcggttggcggcctggttcttgtgaatcacgccagcgccagcggccttgtcgagcttctgggaagcgaccttgtaggcggcttcggcagcggccttatcgccggcggcgatggcctcacgggttgcgcggatggcggtcttcaggctggacttgacggccacgttacgcttgtgcgccttctcattggtgagcacgcgcttcttctgcgacttaatgtttgccacgttttctccaaacgacgtttgctataaggacatacagggagtcatgctaccacgatgttcggataaaaccgaccccgtgttccgtgtgtcgtcgggaaattgccgacggtgaccggtaaacttggtgacttgcggcacatggcgtcacatttacgatgccaaaggcccgcgacgaacgagcaccacggacgaaaggaaccggatcagggtgattgagccgaagaacaagccagggtttaccgatcagtcgctaatccggaatttctgcatcatcgcacatatcgaccacggcaagtccacggtggccgaccgcatcctgcaactgagcggcatcgttcctgagcgcgagatgcgtgaccgcttcctcgaccgcatggacatcgagcaggagcgcggcatcaccatcaaatcgcaggccgtgcgcgtgccgtggaccttcgagggcaccgagtacacgctcggcatgatcgacacccccggccacgtggatttcacgtatgaggtgtcgcgcgcgctggccgcatgcgagggcgcggtgctgctcgtcgacgcgacgcagggcatcgaggcgcagacgctgtccaacctgtacatggccatcgaccatgatctggccatcatccccgtgctcaacaagattgacctgcccagtgccgagccggacaagcacgcggaggagatcgcgggactgatcggatgcaagccgagtgacgtgctgcgcgtgtcgggcaagaccggcgaaggtgtcgccgatctgctcgaccatatcgtcatggaggttcccgctccgcacggcgacccgaaggcgccggcgcgtgcgctgatcttcgactcggtgtacgactcgtaccgcggcatcgtcacctatatccgtatggaggacggtgagctcaagtcgcgtgagaaggtgcacatgatgggcatcggcatgacgcacgagcccatcgagattggcgtcatcagccccgacatgacccccaccaaggcgctcggcgccggcgaggtcggctacatcatcaccggcgcgaaggacgtcagccagtccaaggtcggcgacaccgtgacctccgccgtccgccctgcagccgaggcgctgcccggctatcgcgacccccagcccatggtgtacgcgggtctcttcccgatcgacaacgcccagttccccgaactgcgcgacgcgctcgacaagctcaagctcaacgacgccgcgctcatctacgagcccgagacgtcggtggcgctgggcttcggcttccgatgcgggttcctcggcttgctgcacatggagatcgtctcggagcgtctggaacgcgagttcggtctcgacctgatctccaccgcgccgaacgttccgtatgaggtgaccgccgaggacaacaccgtgcaccgggtgaccaacccgagtgaattcccggacggcaagatcaagaagatcgtcgagccgatggtcgctgccgacatcatcacgccgaaggatttcattggttcggtgatggacctgtgtcaggaccaccgcggcatcatgggcacgatggaatacatctccaccgaccgcgtggagatgcactaccgcatcccgctcgccgagattgtgttcgacttcttcgaccagctcaagtcccgcaccaagggctacgcgtcactcgactaccatgaggacggcgagcaggccgcggacctcgtcaaggtcgacatcctcatccagggcgagaaggtcgacgcgttcagcgccatcgtgcatcgcgacaaggcatacagctacggcgtgatgatgaccaagaagctgcgcgagctgattccccgccagcagttcgagatcccgattcaggcggcgatcggatcgcgcatcatcgcacgcgagaacatccgtgcactgcgcaaggacgtgctcgccaaatgctacggcggcgacatcacccgtaagcgcaagctactcgaaaagcagaaggccggcaagaagcgcatgaagatgctcggccacgtcgaggtgccgcaggaggcgttcatcgcggccctgtccaccggcgaggccggcaacgaccgcgacaccaaggataagatccgcgccgcgcagaagacggaaggctgatggaggtctttgatatgcccccgctggcgggggctgacagccgaaggctggctgggggtggttcagcgaatgaccgccttcagccggctacgccgacaacccccgtcaacgcgggcgatgcggcaggctacgaaatctacatccatgtgccgttctgcatgcggcgttgcggctactgcgatttcaacacatacacggccacggacatgggcgcgggcgcgtcccgcggcaattacgcgaacatggtggtgcgtgagatgcgtctcgtgcgcgattggcagctcgtgcacggcatcgaggagccgcccgtctccacggtgttcttcggcggcggcacgcccactattctgccggcgcgcgatctggtaatgatgctggacgctgtccgcggcctgtggggcatcgaaccggaggcggagatcaccaccgaggcgaatcccgacacggtcgacgagcgctatatcggcgcgctcgcggaaggagggttcacccgcgtgtcattcggcatgcagtcagtcgtgccgcatgtgttgaaaaccctcgaccgcacgcatacgcccgccaatgtggaggccggtgtcagggcggccgacagggccggcctgcgctccagcgtggacctgatctacggggcgccgggggagagccttgacgattggcgggactcggtgcgcacggcagtcgatcttggcgtgaaccatgtctccgcctatgcacttaccgtggaaccgaccacgaagatgggtcgacagatcgcggcgggcacattgcccaagcccgacgatgacgacgaggcagcgaaatacgagatcgccgatgacctgttcgccgcggcgggcctagaatggtacgagatctcgaactggtcgcgcccgggctatgagagccggcacaatctcgggtattggcgcaacgtcgactgggccggcctgggccctggagcgcacagccactacaacacggttatgggcagctccacagacggtgacgccgcgaacagcgacgccgctggagacgtttcggcttccgtaacctccacatcgatgcgcggttgggacatcgcgcatccgcgcatgtgggggatggccatcaacgacggacgtgtgccgtggtcgggcgatgagaccatatcgcccacggagaaccttgaagagctcatcatgcttggcctgcgcattcgggaagggctcgacattggccgcgtcaatcggcatatcgaagcggtgaaccgggcgcaggatgcggcgcagggaacgctgcgcatcatcgacgacgcgtgcctcacgccgctggtcggggatggcctcatcaccctcgacccgacgacgggccatgccgtcgccacgaggagaggccggttgctcaacgacgccgtcatcgagcgcatgttcggcgcggtcggcctgtagtggctccggcagtgaaacgtcgaagcagaccttgaccgtgccgaacttcaccttgctcacgatggagaatgcgtcacccaggctatgccggagatcggcgaggttccgaggtcgcttttcgtgatgagtgcgatgccgaaggattcgatgggcgattcccgccagaaagcatatcagccgcttgatggaatacggcatgaatcatgactcctttcgtgtgttctgcccgatgtagtgctggaaggcaggtcgacgggatgcctgttgcgtcaggcttgaagattctcgattaccttgcgcagagagcttcgcagtctctcgcgttccgccgcggtctcgtaccgtgcagcttcgctgccgtgctagcaccttttgggttgtaagcagactaaatatgtccatcggagaaaagttcaatacagataaaattgaactcaggttgtttcgctgacaaagccgtgatattcttttgaaccagaatttgaactttgaaccaacgtggaggaagtcattggagagcttcgcgacgcggctgagaaccgccatgaacgcccgtcacctcaggcaggtcgacatcgtgcgtgccgcccaggcgtcaggtgtcaaactcggcaaaagccacatcagccaatatgtcagcggcaagacgacgccccgcgcggatacgctcaggttcctcgccgatacactgcaggtcgacgagcaatggctgctcggccatgatcgcggacggcccgacatgccggcgcagccgaaacgggtgccggacaatcccggcggccgggccgacgcgccacgcacgccatcatcccaagcgcccgcaccccagacaacgtcaccatcacacgaaccggaaggaacacccatgcgccacttcaacaaatccaccaaacttgacaacgtgctgtacgacgtgcgcggaccggtcgtcgacgaggccgcccgcatggagcagtccggcatgcacgtgctcaagctcaacatcggcaaccccgcgccgttcggcttccgcacaccggacgaggtcgtatacgacatgtcccggcagctcagcgacacggaaggctactccgcgtccaagggcctgttctcggcgcgcaaggcgatcatgcagtacgcgcagctcaagaacctgcccaatgtcggcatcgaagacatctacaccggcaacggcgtcagcgagctgatcaacctgtcgttgtccgccctgctcgacaacggcgacgaggtgctggtgcccagccccgactacccgctgtggaccgcctgcgtcaacctggccggcggcaccgccgtgcactacgtgtgcgacgaggaatccgaatggtacccggacatcgacgacatgcgcagcaagattaccgaccgcacggtggcgatcgtcctgatcaacccgaacaacccgaccggcgccctctacccgaaggaggtgctgcagcagatcgtcgacctggcccgcgaacaccagctgatgatcttctccgacgagatctacgaccgtctggtgatggacggactccagcacgtctcgatagcgtccatggccccggacctgttctgtgtcacgttctccggcctgtcgaagtcgcacatgatcgcgggctaccgcatcggatggatggtgctcagcggcaacaagtccatcgcgaaggactatgtcgagggcatcaacatgctcaccaacatgcgcatctgctcgaacgtgcccgcccagtcgatcgtgcagaccgccctcggcggccaccagagcgtcaacgactacatcgtgcccggcggccgtctgtacgagcagcgcgaatacatctacaacgcgttgaactcgattcccggcgtcaccgcggtcaagccgaaggccgcgttctacatcttccccaagctcgacgtgaagaagttcaacatcactgatgatgagcagttcgcgcttgacctgctgcatgacaagcgcatcctcatcacgcgcggcggcgggttcaactggcatgagccggaccacttccgcatcgtctacctgccgcgcatcgaagtgctcaaggacgcgacggaaaagctcaccgacttcctcagctgctaccggcagtagtcggcgggcatcacaatacgggtcgaaaaagccgttatccgtgattccccgtgcgaaatcgccgttctgaggctccgaaacggcgatttcacacacccaattgcggataacggctttttcgacccgtaattcgcaaagcggagaggggctcgaggctccccgccgtcacgtcctcgccgccgataggatggacgctatgaaaaagcacatcgtcgcgggcattctggctcatgtggacgcgggcaagaccacgctgtccgaagcgctgctctaccgttcggggcagattcgcaggctcggccgcgtcgatcacggcgatgcgttcctcgacaccgacgcgatggagcgggcgcgaggcatcacgatattcgccgagcccgccatcatccgatccggcgatctgacgatcaccctcatcgatacgccggggcacgtcgatttctccgccgagaccgagcgcgtgctggcggtgctggattacgccatactggtggtgtccggggcggacggcatccaggggcataccgagacgctgtggcgcctgttgcggcgatacaacgtgccgaccttcatattcgtcaacaagatggacgcgcccggcgccgaccgggccgcactgctcgcccagctgcgtgacaggttctccgacggctgcgtggacttcgagaacggtgctccgacccggtcgatggaagacatcgcgatgctcgacgaatcggccatgaacgagttcctggactccggcgccgtcgcggacgagcggctgaaagccatgatatccgcgcgctcgctgttccccgtgttcttcgggtccgccctcgccatggagggcatcgatggcttcctcgccggctttgaacggtataccaaggagatcgaaccgggtgctcgtttcggggcacgtgtatataaggtgtcgcatgacgagcatggcaaccgtctgacgtggctgcgcgtcaccgggggagagatcaaggcgaagatggtgcttgacggcgacgagaaggccgatcaggtgcgcctgtattccggcgcgaaattcaccacggtcgatgcgctgcccgccggctcggtctgcgccgtcaccggcctgacgcacagccgccccggtcaggggctgggcgaccagtgcgacgccgacgccccggtgctgcagccggtgctcacctacacgctgttgccgcagggggaggatcctcaccgttgcctgaccgcgctgcgagaactggatgatgaggaccctctgctgcatgtggtatggcaggagaggctgcaggagatccatgtgcagctcatgggcgcggttcaattggagatcatccagcagatcatgcgggaccgtttcaacttgaacgtcggcttcggccccggatccatcctctacaaggagacgatcgcccatgcggtggagggcatcggccacttcgagccgctacgacactacgccgaggcgcacgtgctgctggagccgggcgagccgggcagcggactgaccttcgccacatcctgttccgaagacgtgctggcccgcaactggcagaggctcatcttgacgcatttcgccgagaaggagcatctgggcgtgctcattggtgtccccatcaccgacatgaagctcacgctgctcaccggccgcgcgcacgagaagcatacggagggtggtgatttccgccaagccacctaccgggccatccgacaggggctgatgaccgccctggtcgagggagacttctcccggcacgacctgttcgacgaggacgccgcggaggacgtcgccgaagacgcggccgcagccgatgccaaaacagcccggacggacgaatcggagtcgtcggacggcagcgccttcgcctccgcggccgcccgcgatcccggctggtgccgggtgctcgaaccgtggtaccgcttccggctcgacatcccgcaggacatgctcggccgggccatgtccgacatacaacgcatgtcgggcatgttcgacccacccgagatggacggccagttcgccgtgctggcgggagtctgcccggtatccgagatgcgcgactacgccatggacgtgaacgtctacacccacggcacgggccatctggggtgcgtgttcgacggctaccggccatgccacaatgcggccgaggtcatcgaacaagcgggatacgatccgggagacgatctcgaaaacacccctgattcggtgttctgcgcgcatggcgccggttacacggtcaaatggtaccgggtgccggatttcatgcatctggatcgcgcatacgacgccgggcagtgacgtcttcgccgggcaaaggggtccggcggcagtgacagtgatattcgtcacacttaacacgccattcacataagagacatctcattgacatgcgaaacgggtgccgcagattttccgaatcgcttgagaaacattgaaattgggtattgacaaacacctcgactcggtatatggacagcgaaacgtgtttgacatagccgagcggtactctttcctacgcactaacaaaagaaccgcaggttgtcaagaccctgccaaaacgatatgaaggtggtttcggtgactttccacgccccgctcgatttgagcatacataaatcacaaggtctgtacgacccaagctcagaacatgacgcttgcggcgtaggtatggtcaccacactcaacaagcggccggaacgtaagatcatcgacgacgccatcgaagtgctcgtcaatctcaaccaccgtggcgccgtgggcgccgaggagaacaccggtgatggtgcgggcatcctgatgagcatgcccgacgagttcatgcgggccaccacgggcgtcgaactgcccgaggccggccattacgcggcgggcatcgcgttcctcgaccgcgacatcgccacgtccggccggcaggagcaggccatcgcgagcatcgtgcgcgaagagggtctggaagtgctcgcctggcgagtggtgccgaccaacccggacgggctcggcctgcaggcgctcgcctcgatgcccagcttcaagacgctggtcatcgccgacgccgaaggcaagctggcgggcatcgagctcgaccgcaagaccttccgcatccgcaagcgcgtcgagcacgaggtcggcatctacttcgcgtcgctgtcggcccgcaccatcacctacaagggcatgctcaccacgatgcagctcaccccgttcttccccgacctgtcggattcgcgcatgaaggcgaagatcgcgattgtgcactcgcgcttctccacgaacacgttcccgagctggccgctcgcgcagccgttccgcctgctcgcccacaacggcgagatcaacacgatccagggcaaccgcaactggctgtcggcccgcgaaggccgcctgagctccgaactgctcggcgagttcgagccgttgctgccgatcaccacgcccggctattcggattccggcacgttcgacgaatgcctcgaactgctgcacctcgccggccgctccctgccgcacgccatctcgatgatgctgccgccggcatgggagaacaacgaccagctcgaccccgacgtgcgcgcgttctacgagtacaacaacacactgatcgaaccgtgggacggcccggccgacatcatcttcaccgacggcacgcaggtgggcgccctgctcgaccgcaacggcttccgtcccggccgctggcagctcaccgatgacggctaccttgtgctcgcctccgaagccggcgtgctgccggagatcgacgacaagcatatcgtctccaagggccgtctggagcccggaaagatgttccttgtcgacaccgacgagggccgcatcatccccgacgaggagatcaagaggaaccttgcctcgcagcacccgtaccgtaagtgggtcgaaggcaactccgtggagatgagcgacctgccgcagcgcgagcacgtgagccattccggccagtccgtgcagcgtcgtcagcgcgcgttcggctacaccgaggaagacctcaagatgctgctcacgccgatggccaacaccggcaaagagccgctgggctcgatgggcaacgacaacccgctgccggtgctctccaagcgcagccgcatgctgttcgactacttccaccagaagttcgcgcaggtcaccaacccgccgctggactgggagcgcgaggagatcgtcacctcgctcgaatccgccattggccccgagccgaacctgctggaggattccgagctgcacgccaagaagatcctgatcccgctgcccgtcatcaactccgatgagatggcgcagctcaagcggctcgacaaggccaaggtgctcggcggatactaccgtccgttcgtcgtcaagggcctgtatcaggttgccggcggcggcaaggcgctgggcgagcgccttgaggagatctttgccgaagtcgacgaggccatcgcgggcggcagcaacttcatcgtgctgtccgaccgtgattccaaccacacgtggggcccgatcccgtcactgctgctcaccagcgccgtgcagcaccacctgctgcgcaagcacacccgcacgcagatctcgatggccgtcgaggccggcgatgtgcgcgagatccatcatgtcgcgctgctgatcgcatacggtgccgcatgcgtcaacccgtatctggcgttcgaatccgtcgaggatctggcccgcaccggctacctgaaggtcgacgagcgcacagccgtgaagaacctgaccaaggcgctgtccatcggcgtgctgaagatcatgtcgaagatgggcgtctccaccatcatgagctaccgcggagcgcagctgttcgaggcggtcggcctgagcaaggacatcgtcgacaagtacttcaccggcacggtctcgcaggtcggcggcatcgggctcgacgagctggccgaggaggtggcgattcgccaccgcgtggcctacccgaaccagtggaccgccaccccgcacatgaacctcgaaaccggcggcgaatacaagtggcgccgtaccggcgaggatcatctgaacgaccccgaggcgattttcctgctgcagcagtcgaccgctcgcggcgactaccagatgtttaagaagtactcgcaccacatcaacgacacgtcgaaccgcattatgacgctgcgcggactcatgaagttcaagcacgaccgcaagccgatcgacatctccgaggtcgagccggcctccgagatcgtcaagcggttctccaccggcgcaatgagctacggctccatctcgcaagaggcgcacgagacgctcgccatcgccatgaacacgatcgatgcgcgttccaactccggcgagggcggcgaatccgacgaccgcatcgaggatccgctgcgttacagccgcatcaagcagatcgcatccgcccgcttcggcgtcaccagcgattacctggtgcacgccaccgacctgcagatcaagctcgcccagggcgccaagcccggcgagggcggccacctgcccggtgccaaggtcccgccgtggatcgccaaggtccgtcacgcgacccccggcgtggagctcatctccccgccgcctcaccacgacatctactccatcgaggatctcaagcagctgatcaacgatgcgaagatggctaacccgaaggcgcgcatccacgtcaagctcgtctcggagttcggcgtcggcaccatcgcggccggtgtggccaagtgccatgccgacgtggtgctgatctccggctatgacggcggcaccggtgcggcaccgctcaacgcgattcgccacgcgggcaccccgtgggagatcggcctgtccgaaacccagcagacgctgattctgaacggtctgcgctcccgcatcgtcgttcagtgcgacggcgagctcaagaccggccgcgacgtggtcatcgccgcgctgctcggtgccgaggaattcggcttcgccaccacggcgcttatggtcgagggctgcgtcatgatgcgcgcgtgccagaagaacacctgcccgcagggcatcgccacccaggatcccgagctgcgcgcccggttcaagggcaagccggaagcggtcatcaacttcttcatgtacatcgccgaggaagtgcgcgaactgcttgccgagctcggtttccgtacgctggaggaggccgtcggccatgtcgaatgcctggaccagaacgaggcgatcaagcgctggaagtccgacggcatcgacctgagcaacgtgctcatgcagcccggcccggttcccggaacgattctgcaccagaccatcgagcagaaccacgaactggagaaggcgctcgacaacaagctcatcgagatggccgaacccgcgctggagcgcaaggagccggtacgcatcgagatgccgatccgcaacgtcaaccgtacgctcggcacgatggtcggctacgagatcacccgccgctacggtgccgaaggactgccggacgacaccatcgacatgacgttccacggtgccggcggccagtcgatcggcgcgttcattccgcgtggcgagaccatccgcgtctacggcgaggtcaacgactacgccggcaagggcctgtcgggcggacgcctgatcgtacgccccgaggacggcgtcaccttcgacccgcacgagaacgtcatcgcgggcaacgtgaccggtttcggcgcgacctccggagagctgttcgtggccggccgtgcaggcgagcgtttcggcgtgcgcaactccggcgccacgttcgtggtcgagggcgtgggcgaccacggctgcgagtacatgaccggaggcaccgtcgtggtgctcggctccatgggccgcaacttcggcgccggcttctccggcggcaacgtgtacgtgctcgatctggacatgaaccaggtcaatccgaccgcggcgaaggacggctcgctgctgttcctaccgctggacgacgaagcacaggcactggtccacgatctggtgaagcgtcacgccgaagagaccggttccgcattcgccgccggactcctcaaggattggaagcacaccgtcgcccggttcacgcacgtggtgccggaacactatctggccatgaccgccgccatggcgaaggccgaggaagacaatatcgatttcaacacgcccggcgcctgggaacaggtgtacgagcaggtgatggaaggagcgcactgacatgggagatcccagaggattcctgaaggtccgtacccgtcgcgaactggcggaacgccccgtcgaggagcgcatcaaggactggcttgacgtccatgctgagtccggcttgcagccgtggaccaccgaacaggccgcccgctgcatggattgcggcactcctttctgcatgaccggatgcccgctcggcaacatcatccccgagttcaacgatctggttcgtcaggagaagtgggaggacgcctacaatcgtctgtccaccaccaacaacttccccgaagtgaccggacgcatctgcccggcactgtgcgagaaggcgtgcgtgctcggcatccaccagccgccgacgatgatcaagctcgacgagcagacgatcatcgaccaggcatggggtctggatatcgtcaagcccatgcctccgcagcgtctgaccgaccagaccgtggcggtcgtcggatccggccccgccggtctggcatgcgcccagcagctcacccgagccggccacacggtcgtcgtctatgagcgcgatgacgccatcggcggtctgatgcgctacggcatcccgaacttcaagctcgacaagcgattgatcgaccgtcgtatcaagcagatggaggccgaaggcacccgcttccgcacgggcgtggagatcggcaaggacatcagctgggacgatttgcgcgaccgctatgacgccgtggtcgtcgctatcggatccaccgtgccgcgtgacatgaagattcccggccgcgagctcaagggcattcacttcgcgatggagttcctgcccgacgcgacccgacgcgtgtacggcgtaaagcccgtgcacgacatcaccgccaaggacaagcacgtcatcatcatcggtggtggcgacaccggttccgactgcctcggcacctccatccgtcaaggcgcgaaggacgtgaccgtgctgcagatcatgccgaaggagccggacgagcgcccggacaaccagccgtggccgacgttcgcgcgtctctaccagaagacctcctcgatggaggagggcggcacttacgtgtacagcaccgattctgtcaacttcgtcggctccgacgaggaacaggcccgtgtgcacattgaggattccaccgagtccgaaggattcgtggccgacgagaacggccacgtcaccggtctgaaggtcgtggatgtggcaccgggggagaacggtccgttcactcgccagcccggtaccgaacgcgtgctgcccgcggatctggtgctcatctcggtcggcttcctgcacccggacacctccacgctgctcgaccagctgcctgtcgaattggacaagcgcggcaacgtggcccgcaacgacaagttcgccacctctcaggatggcgtgttcgttgccggcgacgcgggccgcggccagagcctggtcgtgtgggccatttcggagggccgctcctgcgcagccgccgttgatgagtacctcaccggcgtcaccgagctgcccgcgccgatcaccgcatcccagcgtccgatgatgctgccgcgatgattcgatagtccggcggttcgccgtaccgacatctactggggccggaagtctcttcaagggacttccggcccccagtcgcatatcgggcgttccctatttctggcgaaagtcccgtcctgttgtgtgccggtgggttttcgccggaggaatggcccgctcatgtgtgggtgagccgcagaaggaggccggctatgtgcggggtggtacgtgtcgcggccacggctcggacgtcgtgattgccaacgattgcggatctgtctcgtcgtgcgagtcgaaccgccgctacggcacggcttggagtacagtacataggagtgttatccacaaacgagcaggagaagtaacgatgcctaaccgtgccgaacgccgcaaagcagcaaaagatcagcgtcggggagtcccgtcgcagtacgaccagacccgtggccgtgcccgatccggcatgctcgacgagtacgcgcttcaggagaagtcccgccgtattcaggagggcgtggatgacagcggcgtgtggaagcccagcgctcgcaccgaggtcgatgaggaagtggagtcggtgttcgaggccaacccgaactatcaggatcccaaggcgttcaaggcaccgcactccgtgcggcagtggttccgtgtcggcagctggacgctgatcgcgctgtcggtcatcgcgttcttcgtggtgatgtggctgcccacgcatccgctgtggctgatcctgaccgtgtccgtcgtgttcgtcgtcggtgtgctcagcctgttcttcacggccggcaactaccgcaacaacccgaacctggacgccaacggcaccgctgtgtgagagcctggtatccggtagttacctggtattatggtgtgttttttcgccaacacgaacatgggcattgtgcgtttttttcgacgtgcaatgccctaaagttatatatggcagtagccgcaaacaaggttaccgacgaaggaggccttaatcgtgaaagttgatatcctcacccgcgaatacccgccgtatgtctatggtggcgcaggcgtgcacgcggaagagctctcgaaggtgctggccgagcgggtcgacgtgaccgtccgtgcgttcgacggaccgcgcaccgaagccgatgtacccgccatccccggagatggctcggcgaagggcagcctgaaggtcgtgggctatggaacgccctctgagctggccgacgcgaatccggcgctgaagaccttcggcgttgatctgcagatagccaacgacgtcgacgccgacatcgcccacgcgcacacctggtatgcgtgcctggccggatacctcgccaagatgctgcacggtacgccgctggtcatcaccgcacattcgctggagccgttccgcccgtggaagcgcgagcagctcggcggcggttataatctgagctcctgggccgaaaaggacgcctacgagcacgccgaccgcgtcatcgccgtctccggcggcatgcgcgaggacatcctcgccgcgtacccgaacctcgaccccgacaaggtcgtcgtggtgcataacggcatcaccatgagcgacttcgccacgccggccgacgacgacccgggctgggctgtgttcgaccgttaccacatcgaccgcagcaagcctacgctgctgtttgtcggccgcatcacccgtcagaagggcctgccatacctgctcaaggcgctgcacctgatctccaaggacatccaggtggtgctgtgtgccggcgccccggacaccccggagatcgccgaggaggtcaagaccgcgttcgccaagctcgatgaggaacgcggcaacatcatctggatcgaggagatgttgcctcgtccggagctcaacgcgctggagcatggctgtgacgcgttcatctgcccgagcatctatgagccgctgggcatcgtgaatctggaagccatggcctgtggcctgcccgtagtcgcctccgccaccggcggcattcccgaggtcgtcgtcgacggcgagaccggctatctggtgccgatcgaccagctgcgcgacggtaccggcacgcccaccgatcccgacaagttcgtgcacgacatggccgccgccatcgacaagatcatggccgaccccgaactcgccaagaagatgggccaggcaggctacgagcgcgcccgcgaccatttcagctgggagtccatcgccgacaagaccgtggccgtctaccagtccgtcctcgacgagcagaacaagtaacggcgatccgacgcaggcgggggcaaggaatgatgcccccgcctgcggggccgtaatgcgcggcatgaccggatggcacggcttcgcgaattaccgcgaccattccaaacccgcactgccggcaaacctccccacgacaaggaaccacaacatgcccacgaccgacaccgccgacaacgaagtcctcaagctcgacaacgtcgaattccgccgcaaccggcgcgtcatcatcacagacgtgaacctcatcatccacgcgggggagcgatgggtgctgttcgggccgaacggcatcggcaaatccaccgcggtcggcatgctcgccacgcgcacgttcccctcggacggtcgcgtattcatcctcggccatcagctcggcaaatacgacgtattcaaactgcgcacgcgcatcggtctggcttcggccgacctcggccggcagtttcccgaattcgaggatccgctggacgccgtcgtcacgggcctgagcgccgtgaccggacgatggcgcgacacctatactgacgaggagtatgcgcgggcgcgacagctgctgcgcgacttccgcgtctcctatctcgaaggcaaggagatgtggcggctctccgagggcgagcgcacccgcgtgctcatcgcccgcgcgttgatgggcgaccccgaactgctcatcatggatgagccgaccactggccttgacctgggcggccgcgagcaggtgatgcgcaccctgagccgtatcggcgaagaggattcgcggcgtgccgtggtgctggtcacccatcgacttgaggagattcccgcgggcttcgaccacatcgccatcatgggacgcaagccggtctccgccgaggacgccaccaacgacggcattgacgcgatgggcaacccgtccgccggcaccatcgtctacaccggtccactggaggccggcctgaccgacgagcgactgtcggagctgttcggcatgccgatcgaggtgcaacacacgcacgggcgctggtcggcgttcgcggtgtgagaccgaggcgtatcggtcgctggcgggattcatgaggaaccatgcccgcgcatctgatataacggtagccatgaatggcacgcaagagctgaaggtcgccgtagctcagttcacggttcgccgggagccggaatggaaccttgacattatcgacggatatgcctggcaggccgcggatgccggtgcccacttgctggtgcttccggaagggctgatcgcgcgtgacggcgatgatgacatgttcgtggccgcacacgcgcaaccactgaacgggccgttcgtcaccggcctgagacggatcagcgaagagcgtcatattacgctgatgggcacggttcatgctgtgcccggcgcggctgatgcggtgccggacaagccggcgtcttgcgcaacggattcccgggtctccaacgttttcgtcgtcatccgtgacggggctcttatcgcgacctatcggaagctgcatctctatgatgcattcgccgcgcgggagtccgatacggttcgccccggtaccgagttgccgccaatcgtcgagatcgacggctggcatgtcggcgtcatgacctgctatgacgtgagatttcccgaagtcgcgcggtcgctggccgtgcgcggcgccgatgtgatcatcgtcagtgcggcatgggtgcgcgggcgtttgaaggagcgacattggaagctgatgaccgccgcgcgtgcgctggaaaacacgtgctacgtactggcatgcagcgaggtgagcgcgcgcaacatcggctgcagccgtgtcattgacccgctgggcgaggtcatcgcgcaggcgggtgacggacagggcggggcgggcggacagggcgaggcgggcggacaggctggaatgctgattgcccggctgcaccgagaagttctcgaatccgcgcgacgcacgctgccggttctggagaaccgacgcttcgcagacccgcaattgcgggattgacacaaatttcccgtatgacgcgcatgcggcccgggaatcggccacacgcgtcgcacgacacgcccggattgcgctgcacgaatgtcaaagtgcaccgttgtacttcagtgatcccctgacgattgtgctgagcaatccgggcgtgtcgcgcttgtcggaagcgcaaatcgcgcgaatcagcccggtcggcatcggtcatgcgaacgaggcggaagcgggcgtgccgtactacgacgatatcttcgatgaagacgacgaatgcaccacggccgacatcagcgatccggacgggtcgattgctctgggcctcggcggcatgtactacgaggagggcatgcactataccgccgcatcggaacggcagaagcgggtcgactgtttcagagccgccgagatcctttaccggcacgcgaccggccgcggcaatgcgatcggatggctgtgcctggggtacgtgtacgcgtacgaccgctgcgagggtaggtacttccgctcgtattacaacaattccggcgaagttccacccaaaccggatacggacgttttggcatacgagtgcttttgtcatgcggccgaagcggggatcgcggagggctgctacaagctgggagacatgctggccgagggcagaggctgtgcggctgatcatgcgaaggcgctcgacatgttcctgcgggcgtacatgtgtgacggatattgcggcaggcgaattctacacgaaatacatgattgaggaggacgatactatggatgaggtagtcaaagcagattcttccgcgggcaaaacttaagattttcccagcaagtgacgcttaccatgaacacgcaagcaagaaaatcacggcaaatcatggaaaggagtccatatgtgcactggtgttcgtttctccgacgatgagggaaacatgtatttcggccgtaatctcgactggagcttctcctacggcgagaccattctggtcactccacgaggctaccagtacgactatgtgtatggggccgaaggtaaaagcgaaccgaatgcggtgatcggcgtgggcgtggtcatggtcgaccgccccatgtatttcgactgcgccaacgagcatggtctggccattgccggactgaacttccctgggtacgcctcctttgcgcacgagccggtcgaaggaaccgaaaacgtcgccactttcgaattcccactgtgggtaacgcgcaatttcgatactgtcgacgaagtcgaagaggcgttgaagaacgtgacgctcgtttcgcaggtcgtgcccggccagcaggaatctctgttgcactggttcattggtgacggcacccgcagcatcgtcgtcgagcagatggctgacggcatgcacgttcatcatgacgatgtggacgtgcttaccaaccagccgaccttcgactttcatatggaaaacctgcgcaactacatgtgtgtgagcaacgagatggcggagccgaccacttggggcaaggcggaactgagcgcatggggtgccggtgtgagcatgcacggcattcccggtgacgtgagttcgccgtcgcgtttcgtacgcgtcgcctacaccaacacgcactatccgcagcagaacaacgaggctgctaatgtgtctcgtctgttccacacgctggtttccgtgcaaatggttgacggcatgtccaagatgggcaacggccagttcgagcgcacgctgttcaccagtggctattccgggaaaaccaacacgtattacatgaacacgtatgaggatccggcgatccgctcgtttgccatgtccgacttcgacatggattcgagcgagctgatcaccgccgactgattccgggaatttcgagttcgaagattccagttccaaagattccgcagtgatcgcactatatggacagcataaaagtgcacaacgtcgcaacctgaaccgcgccccgattgttggactgaagaaattcagattcgatgatcggaggtgcggttctttcgtatgcgtgaggatcgaaggagccgttacgacgacgggttccggcgcgaggcgctggaactcatcaaggccggagccggcagggacgcgctcgccagacggcttgccatgcccagacagaccgcggaaaaatggatcatactgtacaggtccggtggcgaggaggcgatcatgggggggggaaaggcaacggcagcagacgctacaactgggagacgaaggtcgccgcggcgcgcgaccacgtcgagaacggtctgaccaagacggaggccatggccagacacgggatcgcgagcatcgtggattggcaacggtgtgttagacggtttcttagaggacaagtccctgttcggtgaattcctttgggctccggtatccgagggcggaccggttctatggcgtcgatttggaaattcgcgcacgcgaatccatgtcgctaaaggtcactgatccagttcgattcgtacgtaactttgtgcccgccactaccgtgtcgtattcattcgatgatgaagggccacgtaggcagattctgtctgaattcgtacagtcgtttattgtggccatcaattcgttgtccaatgaatatcgtatttcgcaattgctcggcaaggcgaatgacatcgcagcatgcgtgcgtggcgatcgggcgaatgtaggtacgtggaatgatcgttttggctttgaagtgttcagcgtgggcatcgaaagcatcgagctcaccgagcaatcacgtcaactcgtgcagcagttcgcctcgaataggatgaatgttgccgcatacgagggcgtttcccagcaagatggcaatatggctgcccagcagcgcattgcgcaaggcatccaagacaacggctttggcgatggcggcatgttactgggcatgaatatggcgcaagccatcaatcctatgaccgccgccccggttcaagcgccggcgcctactccggcaccggaagccgctgctcccgcctctcacacggcatccatgtctgtggaagaacaagtcgaggcgatgaaaaaatgaggcttctgctgttttcgtgggttagaggacggggaccggcaatcggatgggtaggccggagcatctgagtttgatcatggcgatgaggttgtcgacgtggtggaagccgtaggccatgcgtatggtgaccttgatcctgttgttgaacgcctccagtcgcgcgttggagtggccgggtcggatggttctgaggatgtcgtcccggcgcctgcggatcttcctgcatagttcgacgatctcggggatgcgcgagtggctggcccagttgatccatcgtttgagttttttccccccccctcggcttggccggcgggctggtgcaggagcgtgcgcaggagttccttgagctgccaggagcggtagagctggcccttgggatccacgccggcgagcgtggcgagggccgtggattggcgctcggccaagtcgccggggtttctgagcacggcgtatttcaggcccttcatcgcctccgcggccgtcttatccttcgctcgcctggcctggttccacaaccgtttcctgacccggtccaggcagtcggtcatccaggagacgatgtggaatgagtcgggcacgcgctccgcgttcgggcagtatccggcgacggacgagtcgatccacctggcgccgtcgccggtgacgatcctgatggaggcgcgctgctccggcgtcaattcttcgaagaacaggtcgaggacctgtttgccgtatccgtcgtgcgcccaaatcacccgcttgcgttcgtggtcgacgacgacggtgatgtacgtgtggcccttcctgtggctggtctcgtccacgccgatcgccgtgagcccgtcgaacatgcatggcatgccggattccagccggccggcgacccgtccggcgatgtcgcccgcggtcctccacgcgacatgcaggaaaccgctcacggtcttcctgttggcgaccgtcatcagccacgtgcattccagctcgaagtcgcgcgtgaaccggctgcccggctccgcccacggaacccgcgacaccaccacgccatgcacacggcattccacacgcggagccggacccacgagctcgacccgatagcagccgaagtcctggtgcagccaacgcctttcgccgcccccgtcgtcgtatttcgggcatttgcgcccgcagcgcgagcaacgcaacgcggccttcctgcacctgacgcgcgccaccaggaccggagcgtcgcgcagcggggaatcgtcgatggacacgtcctcgacgaccatgcccttgacgttgagcaaacgtttgaatatgttcttcataaggcgttttctgtggttctttttcttggtcgaaaaacaaacctacaggaaacgcccctcacaccctcataatcaacggctcaacgacgagacgacacccacgaaaacaacacaagagccagaaatggtgactctgcatcttgaagaacttcttccaatgtgtaattcttcaaagcggtttccacggcgatgatccgagggtaaattaaagatttcaacgccatatcaaaagaattcaatgatgagatttgctcgaaggactgcaagtgaagacgattctttgcaatgccagcgaatcggtaccccttatagccgtggtaataccccaggtttttcaattctcttttttgcaattcaccagaacatgcaatgccgttgtcacacagatgctgcataagttcatccagtgttttcattgcacccctattcgccaaagtcataagggttaattgtaacttgaagtatgccttagcagtgtggtgtctgccggctcatggtgttggaagaatctttttcattacggttatggttttcggacactacccgattgcatcttgcttattccccggttccataccttgttgggcgtcttgctgccaaggagcttcatggagcatcgttgatttccttggcgattacgttgaacccatcccgcatgagcgtgaagtatgtgattggaatctgggtgcgtgcaagtgcgtgaaaatgcgcgagaaaagtgctcgaatctgctttaacaggctgctgcttttaatgcaggctctatctgttgaaagcccctcgcgctcgcgaagaaaacatggctcatggtgaatgcgggatcgcccgcatgttatccatcgaacaaataaaggagcagataccatgggcattaagcacagtgtgtcttatcagagtggagagaacatggccaagaaaaccgacgaagagctttacgatgtggcgataactatgatcggaagcgttgcgaagcttccggttatcagggttgatagggaagcgtttctgcggcagcaattcgccggttcggaatatcttgatgagattctggagcatggcccgcagcatgtgtatacggcggagtcgttgcgaagaaaagcggatgggctgattaagaaatcaacgaatcagaccactcttgccgccttcgtggcaggaatccccggcgggcctgccgccgttgccgctggaggtgccgatgtggcccaatactttggtttcgcgatcaatctggcgcagaaaatcgcctatctcttcggagaggatgatttgttcaccgacgagtcggaactgaatgaaggtgccaaagtccgagtccttgcgtatttgggtgtgatgctcggcgcgtcaggttcggcgatgttggtaggaaagcttgccagggaagtcggcaagaacatgggcaagaggatcacgcaacaggctttgacgaaaacgacttggtatccactgctcaagaaaatcggcgcgatggttggcaaacgggtggtgaaggagtcggttgggaaggctgttgccaaggttgtgcccgttgttggcggtgctatttccggggtgataacctatgcgacgttcaaacctatgggtggccgattggccgatgtgctggtacgtaatctgaatggtgattttgatgagacaggcatggaacttcgcccggaattcaagaaagcccatgccttggaaaatgacgaagtcacgattcatgcgattgagatagacaactgagaagcgggggactgggttgctggcggataaataatctgccagcaactgaatatttgcagctttcaaggccactgattattccctttcaaggccaccgttattgccaaagaaggccagtggcggaccggttcaaggccactgaccccctttggtcaggattcgagcatggattgtccgtgccgttgcctcatgttgaattcgccggtgtcgatccataccgtgttgtgcacgatgcggtcgaggatggcgtcggcgatggtgtcgccgccgagacggctgtgccattccttggtggccagctgggtcgcgaacgcggtgctggcgttgtcgtagcgcagttccatgagctcaagcaggaagcgcctgaactgctcgtcgggcttgtccacgagccattcgtcgatcgcgagcagcgtgtacgtggagtatttgcgcacgagcttggccggacctcccggcttgagggccgcggccgcgacctgttccgcgaggtcgggcatccgtatgtagcaggcgcggtggcgtcccctgcacgcggatttcaccaacgcgcatagcaggaacgacttgcccgatccggtggctccctggaacgcgacgttcagacgctgtccgaggtggttgccggcgtcgagtccggcgagcacgccgcggtcgagcccgcgctcctcggcgaggtcgatggtgcgcaggtcggcctgcggatagcgcagtcccgcccgtttgaccaggcgttggatcttcgcgtcggtgtatccgccgtacgcgttgtcgaccgcgaggccgaccacctcggcatggttcaggggcatgacggtccgttcgtcgagccgttcgaacgcgtcgagcagttcggcggcgttcatctcgcgcagtttgcgtttggtctcggaatcgatgatcatcgcgctcacctgcccatgttcgcgtagtagtcgccgccacgcacccagccgccggcgccgtcatcggatgtttccgtcagcccgccggtcatgtcctggccggtctcgagtatcggcctgatgtgcgagtaccttggcgaggcgaccgactgcagggccagcgagcacgcgttctcgagacgccgctcggaatagcgtctcgagagcagcagcaccgccaacgcgggctccaccccctggtcgtcgaagcgctgcgcggcgaacagcctcccgacgacgtccgcgcagtccggtccgacgcgtttcgcccatcgctcgcagcgttcccggtcccattgcctccatccggccttcccgggcaggtcggtctcgttcgtgctgtatcggttggccgccgtggcgggcaggagcctgtgcgtgcagagcctggagcccttgtgccacacctcgagcgtgtcggagccgacgcgcaggtccacgacggttccggcgtaggcgtacgggacggaataccagttgcgcgcatacgcgacgtggcagttggactgcaccttcctgccgtatatccagtccgccacctcgtacgccgttcccggcagcggtatcagcagcggcctctcgttggactcgaacacggaccgtctggagccgtcgcgtttctggaacggacgggaattgtactcgtccagccacccgcggacggccccgcgcagctcgtccagcgacgcgaacgcgcggtcgcgcatcgctcccgccagcgccatggtcgcgtgccataccgtgttctccgctgacggcttgtccttcggcctgcgcacgcgtccggggatcaccgcggcggaatagtgctcggccatggagcggtacgcgtcgttgagcacgacctcgccgtcgcgcggatggctgatcacgccggtcttgaggttgtcgcacaccagacgtggcgtggagccgccgaaccactcgtacatcgcaacgtggcaccgcagccaggcgttctgccccatgtcgagcgtcggctccacgaacgcgtaccggctgaacggcagcaccgctacgaacaggtacgccttcgaaacgtcgccggtgaccggatcgacgatccgcatggtcttgccggcccaatcgacctcgatggtgcgtccggccttgtgctcgaccctgctcgtcacaccggtcctcgccacataagcggcgtactgcttgcagaaacggtcgtaacccatgcgaggcctgcccgcggcggcgcattcgtcggcgtactcgccgtgcaggatgcgcagggtcactccgacacgcgcgagctcgcggtggaccctggcccagtcgggctgctcgtacacgctttcccgttcgcccctgccggggaacagcatcgagtacacctcgtcgtccggtttcgtctcaacgtccggataggcgattcccgcggccgccgaggcggcctgcacctcggccacgctctgcctggcaatccccaacgatctggcgatcgcccgcccggacagaccctggtcgttgaggcggagtatcgccttggccttgattttccttaccattgtcggtaactcctttcaccacacgtccctcgcatggtgaaaggagcctaacaaccagtggccttgatacgcaataacggtggccttgaaccgcaataatcgtcaaaaagcgcgatcggccttcttcggcaataacagtggccttgaaacgagcaaatattcaagcaacccagtcccatcatcgttgtagctggctgaatagatcgctattcttcgaacgccttgtctacgaattcggcgagtttgccttcttttgcgagctgggcggtgtcggccatcgcgaaattcgtgtatatatccatctggggcaaaataagtataaaaaaattatttcgaagagtctgctatccttctgaataattttctccttgacttgtcgtttaacaagtttgcccttttctgattctgttcttccactatttggcggtaagccttgcctaattcatctatcgaagattgataggtatcttctggttcaattgcagcatcttttttgatgggaatcccgaacatgctcatagcctctactgtggtaaattctcgtactttatatgcggcttttctcagttcatcagtggttaggggattcgccatcagaatctcataagcgacaagaacatctgccatggtttctttaggactggtgctaaatgcagaataaaatcgtacgagatcttctcgcaaatactcaaggttcgaatcaatttgttggattttcttctcgttcgaagagagcattttttgagttcgctttgtcgtgtatgcaacatagaccgtcacacatatgctgacaacactgatgatccaaggaattactgtttgcagtattttccatgtggccatttggattccccttccgtcctgcaattggctgtgacaaaccaatcatctggtatttagttgatttgtcacagccatatggttatttcttcctattgcagtgctttcacttcgtcaagcagggtctgataggtggtggcctgctcgtaacgggttccatctgcgagatcgagttggttgaacagtcgtttcgtgcaggctatcttgctgttctcgattccacgcaggtcgaacgattccaggctgcctttggtttcggcgacgaagaacaggtgcttgagaccgctgtcgtcgcggaaggccacggcccagtcaggggcgtagttgccgaccggggtcggaatctggaatccacgcggcagtttcgcatacaccgcgacttccgccgcgttatcgaggtccttggcgaaatcgctttcgatcctgccatcggggaacacccagtcctgcacgcacttggacgcctgatagccttcggcctcatcacgattgttgccgcccttggtgaagatactcgaatcgtatccgccttcgatccggtcgtagcagatatggtcaacgaccatgttcgccttctcctgaacaatcagacggccgaccctcgcgatgaattgctccggattgtcacggaacatgaggaacttgtccgggcggatgcccttgaggatgtgcgcggcgcaccggcgcgtaatggtcgcggcctgcgcgatctcgccgagcagatcgtatctcacgccgttcgaagcgtcgacatccaagtcaccggtatgggagtcgttcctgtggaagtgtgtgcggtccgcgagctcgtcgcgtgaggcattctccttctggatgccgcgcgtgaccgtgtaggacagtttcgatacgaccagacgctcgtcaattgccttgactgcgtttttgacgagttcgtcgtcgttgaagctgacggtatacgcatacttgtggttgatgcgcttccagagctcctggaactccttcttctgccagttggcattgagcggattgccatgtaccttacgcttcaatgcgttgccgatcagcaccttggtggtgccttccaccacgctgtccagcacgagacggattgccgggaccttctttcgcaagggttctggtagaagttccaccgcatccttgccgaaacgctcttccttgtacttgtcggtcagcttgccgtcgcggtcgatgagccggtccacggtcagcgcgtacacgatgtcacgcgcctcgtccttgctgaacgacacgtctcccaagcccgcatactccggaccgagcttgtcggccggaacgcatgtcttggcgaagaacgcatcgttgatgacgattggccgctctcgcaggtcggtctcgatgtccttctgcaggctttcggcgaacctttcgtagctttccgacgcgataacggtcaacaggttcacgtcaaggaagtccgcgtcgctgagcaggttacgatcctgacgcacgccctcgcggttcacgcacaggcgcaggccgcgtccgacctcctgtcgtttgccgacttcgttgtccgaatgcttcagcgtgcagatctggaacacgttgggattgtcccatccttcgcgcagcgcggaatggctgaagatgaacctcgtgggctcgtcgaagctcaacaatcgttccttgttcttcaggatcaggtcgtacgcgctgatgtcgtcgctgtcttccgacccgcgtttgactttcgagtcgatggaatgaccgtgcttgtcgatgctgaaatatcctttgtgcacgtaacggccgtgcgtggtgcgcaaccagtcgagatagccggacccgtcgtcgagacggttctcgacgaaatcatgcacgcaacggtcgtactcctgctcgaacatgtccgcatactcgccgtttaacggctcgccgtcatcgtcgtaccggcggtatttcgcaacctcgtcgatgaagaacaggctcaggcacttgataccgcgcgcccacaggtgctcctccttgtgcaggtgggagaggatggtctcgcggatctgcacgcggcgcatgtctgcctcggatccgtcgttcatgatacggcccttgccgagcgtctcgccgttcatgaaccgcacgtagccggtccggcccggctccaggccgtcgggcacgatgccgtccggagcgatgcgccagccgtcgcggtacgcctctagcccgccggacgcggtgtagacgtcgtcgccctcgtcgaacagtccggacgtggtcacgaccttaccggctgaggacagcttcttgtattcgatacgggcctgcggcgccctgtttttgctgacgatgatgtcctgcagatacaggtagccgtcggtgccgcgcatgttgttcagctcgaagcccttgacctcgatgcgcttgaccagacgctggttgtacgcgtccagcgcgtccagcgcatacacgaggtcgtgctttatcttgtgcgtggcggaatagttcagcgtgaacaatggtttgaacaggcgtatgcccgcctgcgtggccttgccgcccatcttctgcggctcgtccaggatcatgatcggatggctcgcactgatcacgtcgatcgggcggcgcgagccgaaatcgtcacgttccgagaagatgattctcgcgtccttgctacgcccgttctccttcatggacgtgttgaacgcctgcatgttgatgaccatcacctggatgtccgaggactgggcgaactcgtccagccggttcagattcgacgagtcgtagatgaaggagtgcagtttcttcccatagccttcgttgccgtcgcggccggacgtgtagaaatagtcgcctgtcatgtccaacgatttggcgacgccctcgcggatggcgatggacgggaccacgacgatgaacttcgaccagccatacctgcggttcaattcgaacatggtcttcgtgtacacgaacgtcttgcccgtgccggtctccatctccacgtccagttcgacggcaccggccggatccgtgtacagcttcggggattccgtcaggttctgccggcgttgcacgtttttgatgttggcgagcagcctttcgccgtccagcagcaggtccgcgttgcggtagcccgtgtcgtcatccgcgtcgaaatggccgagcatctcctgcaccggcctcaactcggggatatcgaaagtgtcctgaacgggattgagcacttgggatgcgggcttacggataccggtgtcgcggatataggagacgccatcctgcagcggctggccgtcgaacacgtcgcataccgcgtccgcagcatcggtctggtactggtattgcgagaatttgaattgcatatcggtgacctcagatgatgcggatctgcgtggcgccggtcttctcgtcggcggactgcttaaagatctcggtgaagttcgtacgcgcagcactgttcaggaaaccgttctcagagaccagcacataggacggacgcggcctgaacgacgccatcgcgcggaccagcgattcggggatactgtcctcgaagcatgcgagcagctggccgtcgtttacgctgtacacggtgtggccgtcgaactcgcctcccgacaggacgtcgatcttcgagctgtacggcaactgaaacttcggcagcgcctcgaacagcagatccagatcggaacgatccattttcgtgatgtccacgtcgtcgtcgatgtccttctgggaatactcgtcgacgagcttgcgcctgtcctcgtaattcgagtcatccacacggagcacacggaagccgatgtccggcaccttcttgggagtgccgtcgagtgtcagttgcgcattctccgcttcaatctcggacttgattttctcgccggcacggcggatgcgttcctcgccgatttctgtaagagtcgagtattggcctgttgtctcttcaggcagctgaacaaggataaatttacgctgtccctcatcatcggcattttcttggatgacagcttcgcccatggttgctgaaccggagaagaagtccaatatgagggaatccttatcggaggcaatatcaagaatacgtttcatcaaacgtgtcggcttcggggtatcgaaaggaacttcttcagggaaaagtgctttcagctcttttttaccttcctggttgtgccctacttccgtataaggccatattgtttgacatgcgacaccctgtttgacctctgagaggaagcgtttgatcgccggcatgttattgccgtcttcgccgaaccatactcgattatcagcaatcatttttccatgaccggttgtgtatacagccagcatcgaccgcttggagggttatgctgcttcccattgggagcagtgagcgtatagaactgtgatttcgttccgtgtccaccttgtgcagtggaattctccggtttccatggtcctcggggatcgttgtcacgatttgtgtatcgtgcgttcatttcgtcgctgcgtttgagaagattcggaaaccattgtgatttgttttttgcatagacaagaatatagtcatggctttcagagaaccattggacggcattttgcgggctatatcttttttgccatatgattgtgtcgacgaaattagaagcgccaaaaatctcgtcacatatgttttttaggttcttatcctcattatcatcgatgctgatgaagatggcaccatcctgggtgaacagatcacgtgcaagcaggaggcgtgggtagatcatcgagcaccagtcggaatggaaacgcccgttgctttccggattggcgaccaagcggccgccttcctcgttgtattctccgctttcggcattgaattcgtcatgggtttgggagaagtcgtcgtcgtagacgaaatcgtggccggtgttgtagggcggatcgatgtagatgagcttgactttgccggcgtagttctcgcgcaggagcttcaacgcgtcgaggttgtctccctcgatgtacaggttcctggtggtgtcccagtccttgctgcgttccttgacgggtcgcagggtcttggcgatgggttcgcgggcgaggcgtttcgcctcgcgtttgccgggccaagtgaactggtagcgttcccggttgccttccgccacatcactaagtcgctctttcagcgcgtcgaagtccaccgcgcgttcggttctgccggtcttcgggtcagtgatctcggtggccacgtctggaaacagggcgagcagcctgtccacgttctccctggtcaaatccggtgtgatgccgtggatcttctcgatgtcactcacagtgtttctccttgttgttcctgttcgagctcgtgccgcttggcctgcagatcgtcccatagcctgttccgctggcctatctggacggtcctggcgtggcgtcgttccagctggtctatttctttgataagtctcattatgcgcgtgcgggacacgatgcgtcggtcgacgcgcgtcggatccgacgagctgaggatggtctccgcgcacaacgactcccatacggtgtccagattggttccgctcagacgaatgagtgcggattcgcattccaccggttctcccatatgaaccgagccctccatgagcccttcggccacgttcgcgttgcgaaacaccgcgaatcttgtcatgctgccattcacgcagacgaacaggatacgcgacctgtgatgggtcagttcatcacgggtgcgggcgatgtgctccatgacctccagcggcggatgttctgtggattgctctaggccaatcacgttgatttcgttggtgaacggtcctgctggtatgccggtctcctgctcgcggatcacggcgagcatggtgattgagtcgatgtcctcgatgaaatgctgccgtaagcgtttacctactttggtgttcgtatagaagcgttctttggcgagccgtcccctcggatgcatgaccgcggtggtgctgggcagtcccaacgtgagtgcggtcacaggtccgcatgattcgatgccgctcatgacttaccttccgttgcaggacggatgacgaggaaacaaactagttcgaaatcgtcgagcccctttatattctcgtcaaggaaattccccatggatccagtgaagaaactgtcggccgcagtcgcatcatcctggtccaggatgcttctgaccgcatcgcgtagcaagtcggaagcgtggcgcatgtctctgccgtcatgggtgaaccgattgtatgcgtggcataggcgcggatcatatgtatccttgcctttgcacagcttgcgcatcacatcgagacagtccttggcattcagatgcccgtgcaggatccttccgtcgtcgccgacatgcacgagataataggggtggatcgggttgcggcccacggccttcacgtccttgttcgtattgcgcagcacgaacaggatgccaggctcgttgccctcgaccacagcgttgatgcccgtaggtgtgcgctcgatgtcggggttgtcgcgatgatagccgactagatccatgcggaactcattgagaccgaggtcggtgatgctgacgccgccgtccacatcttcaagatcaagtatctcgtcctgcatctgcctgagctgacgttccctgtactccaaatctcccttctcgtcgggattgatgtagtcatcgtcgccggtggaagccatcacagcgaccttcatgcgtgcctcgactctgtctttgagcttgagatatttgtcgagatccacgtcgggccagtagttgaccagctggatgtgtttgttcgtggagccgatacggtcgatgcggccgaaccgctggatgatgcgaacggggttccagtggatgtcgtagttgaccatcatgtcgcagtcctgcaggttctggccctcggagatgcagtccgtggcgatcagaatgtcgatgtctgtgtctttcaaccggggcacagttatatcgcgttcctttgaaataggggagaagcatgccaggatgtcgaacatgcgaccgcctaccttcttaaccgtgcatcgtcccggattcgtgccggtcacttccgcggtatttaatcccagcatgccggcgtatttgctgacgtgttcgtacaggtagtcggcggtgtcggcgaacgcggtgaagatgaggagcttgtggttgccggggttgatgggctggttctgcttgtcgctgatggttcggtacagacgctgcagcttcgcgtcgtgtgctgcgtcgataccggcaaccatgtccagcaggcggtggataacatccatgtcgcgaagaatgcaatcgcgccaggtgcgccaatccatgtcggacagcaggaatctggtcttgcctttggtagcgaactcgtccggatccatactctccgtgtcgtcctggtctaggtcaaatccgtcgtcgaaacgatcaatatcaatttgctcaagcacgccggtgtcgtaatgcttggcacggtattcctcatacgagtcgatcgtgccgaccgtatctgacatgtagccgagcacacgatccaacgtcatgcggaacgagtggacgctgctctcgaaacgtttgagcaggttcgtggccatgagcttacgcacacccgtttctcggccccggatggtcaggccttcgattttgtcatcgtcgaagtacttgctcatgcgcgattcgagcacgaactcggacggggtgtacaacgcgagggtgagcctttccaactcgtcgtagatctcgtcgtaagacgcgcagtcgctttccgtggacagcgccgggcggatggtctgcgggcggagacgttcagggaagccgccgatcgcatccatatcgtaatggttacggatgtggcggcggctgcgcgcgacggtgacctgatcgaggatacggaagaaatcgaagtcgagcatgtccatcagacgtttggtgttgcgttcctccggttcgagtttcgaccagacaccgtaagccttctgcgcgttgcggaacaccatatcgatattggtggaaagcccgagcttcctggaccattcatcgcctttgtcgccgtaggccagttcgagctggttctgcagatcgcggaaacgattgttcaccggggtggcggagagcataagcacctttgtaggcacgccggaatggatgaccttgttgaggagcttctggtatcggttttctttgtcgtcggccttggcggcgctgtctgcgccattgcggaagttgtgcgactcatcgatgacgacgagatcatagttgccccagttgatccgttcaatcgggatgttcataatcgtatcgccccgcgtgcggctcagatccgtatggaacagcacatcgtaacgcagatggtcgccggcgattggattgttcgttgcgttcgaccggtacgtgacccagttgtccttgagcttcttcgggcacagaacaagtacgttgcggttgcgggcctcgaagtacttgaccacggccagtgcggtgaacgtcttgcccaaaccgaccgaatcggccaagatgcagccgttgtatgtttcgagcttgttgatgattgcgagggccgcgtccttctggaagtcgtacagcttgttccagatcaggctttcacggaaaccggtgccttccttcggtagcacatcctcggagatgtcatcaaggaactcgctgaagatacggtacagggccatgtagtagacgagttcgggcgggttttcttggtacatgcgctcgatgccgtcgatgaccttgtcggtcacgtcatgcaagtctccgctgttccatgcctcattgattttgtccagaaatccctccgccatgaagtcttccatcttggcgacgccttggtatgaggcggcgtgtcggctcacgcccagctgtgtggtcgtgaactcgttgaacggcatgtacgcggttttctcatcgtcatgttccacgatgagggatggagtgatatccgacccctcatcgaacgacatgaaccgtgccttcttacggcggatccaatcggcgcattccgtggcgatggccttctgtgtgagctcattgcgtaggcggatttccaacggagtgccgtacaggttctgttcgcgttccaggcgagggatgtagaactcgcgttgctccttcggggtggcatcctcagtgaacgtcttcgacgtgtaaatgaaacggaatgagcctgcgctctccaattgctcgcgcaactccctatacgcgtacatcgagaacgatgccgccgcgatggatatcctgtcgccttcgcgtatcgtacggacaaggtcatccttgaccagcgaggtcctgttatcaataaagccctgagtcacagcgcctattctagtggaggagggaccaaggggcagtagcgacgccttaacatttgtcagggtattgcatcatgtgagtatatacgattgttcatgagtgagtaatcagagcgaagaggaagaccaaaatggacaagaaattagatttgacggaaccgattattgcatggttactagaacctgatagcagtcgtgcagaagtggcagccatgttgcgcgatacggggaaacgtttcgagctcgctgttccgttcagaggcaattttgataaatatcagcagtggtttttatcgagcgggacggttgttcttaacgataagcctcttgaaccagtggaattgccgagcataattcgcacggtatcgaatggcaggttttatacccttgtgggatgtcaggtgagtggttctgtgtctgcaggaaccggaactggaattgtcgttcctacatatgtggttttcgggactagcgaaacgaatttcgaaaaaatacatgcgatgcgttctaacattccaggtttgtcaccgtggtcgggagtttcctcactctcgctttcttttggtgatggctcttcaaagaaaactgaagtgattgcggagccgcgcaatgagatcgtgatcgatgagtcagtgggattgaagctgcggcctgattactctgtaaagacttctttgaggagagatgaggttactgctcgacaaatggtctccatcgaaactaggacagatgaattgcgggattggacatggcatttgttctatcatcgctctttgttgaacctgcttactatttctgattgggttccaagagcgtttgctaacttggaggttcttcggaacgaggattcctacgaattagatgggaaaaaaagagaggtatggcaccctgttttgtcatatatgccgcgagtcgaccgttcccactttgagaatcctgagtctcagtatctctttcgcttttctgatatccgtgaagaaggaattcggaaatggcttgaactagtagatagatgtcaacaaggaatgactcttcttgcctacgtggcgaaggaacaggaacatcttgcccttgaaacgttgaatatgctgacggggaccatacttgactgcattggatggtacgttgttgagacaaagaatcagacagaacggatgatacaaaattctaaaaccggtgaaatacgttcggccggtttttaccaaatgcttgaggctgtacaagaggaattaggagatgtctttccatttactgatccagaagattggaaaagggacatgagaaaggcattcgtcggaaataagcatggcgatgcggaaggcgtagatttccaaacaatgtatgacgtgacaatgcaatcattggtcattgcgcgaatgtgggtaggtctgcaattaggtgctgacgggaatacgttgaaggaacgtgtctcttctgatgaaattggtaagagagttagtcggtttattgcatggtagtgtgccgagtcggaagccgctttgtagcatgcttctacggacatcaagtcaggcttcttgctttggagagaagcgcatctaattggacagatacaactaattgaagtatccaaagctttatagtgtggcgatggcaactgttgccaataaaaagtccagtaaaactcttttcgagcaagtaatcatttaagagaggggaaagcaccatggacgctggaaagaaaatcctgctggacctattgaccggttcgcttcggtttgcagtgccggtgtatcagcgcagatattcatggggtgagacgcagtgccggcaattgtgggctgacatcgtaacggctggcaggcaccctgagagaacccatttcaccggatcgatcgtgtggatgcaggacggcggcatcggcccggatggtgtcagccggtgccagctcatcgacggccagcagcgcctcgcctcggtgacccttctgctcatcgcgctggccgaatacgcccgcgaacaccctgagaaactgcgattctccgcagacatgctcatcgaccgtggctatctggtcgacaagtacgcaaccggcgaaggccgctacaagctgacgctttccggcgacgatagggaggtgctgcacagcatgtgtgaccatgtggtcgccccaggtcggccgaatcaagccaatatgggttcccggctggaaacgaacctcgatctgttccgttcactggtcgccgcaatcgatgatgcgaacgtggtgtggaacggtttgcaacgtctcgaagtcgtgtccgtcaccttggaccaggggcgtgacgaaccgcaactggtattcgaatcaatgaattccaccgggcttgatctggagacttccgatctggtacgcaactacatgctcatggggtgccccatggccgagcagaacaccctatacgccgactactggctgcccatggaacgtgttcttggcaacctctcattcgatgcgttcctgcacgactggatggtcgtcacattgaaaaagcccgtaaccaaaggtcgcgccatgtatgcggaattcaaacgttttgcggccgacagttccttgtcacgcatggaacgcgtgcgaaatcttcttgagaacatgctggaatacgccaagtactatgccgctatcaaaggcgttgtcgccgctggcagtggcgacatgaacgtggatcgccggctcgaatcgattcaaaaactggatagcacggttacagacccgttggttatgtacatgttcgcggcgtggaagcatcattgcacaaaccgcgacggattgctgcgtatgctcgcggatcttgaatcgtatctgttccgcagaatgatctgctcggtatccagcaacggattgaacaagctcgttccgtctctgattgccaaacttgggtcagccgaacacgatttggtcgaaaccttcgccgcgctgctgctcaccgaaaccgccaaagccacgcgcatgcccacagacgaacaattcaagcaggcgctgctcggcgaggatctgtaccgcccggctccgcggtgcaaatatctgcttgccggattggaaaaccacaaccaccccaagaatccgcgatccttcagcgaatacaccgtcgaacacatcatgccgcagaacgccatggcacatgccgaatggcgcaatatgctcgccgaccccgaccgattcccactgctggtgaacagtttgggcaatctgacattgaccgcatacaactcggaactttccgacggaacattcgaacagaagaagaaccgtgcgatcggcgggtatagtagcgaatacctgtccatttccgccgaactgcacgacgccacgcaatgggatgaacaggcgatcgcgcggcgcggcgcgcgacttgccgatcttgcattgcaggtgtggacaagccccacagcgggggaacaggctatgcagactctgcgcagcaggaacttgagccaaggagagcgcgaacagaatgccgtcgatttcgccgacttatgcaagagagggatccttacagccggtgacatgttggaaagtcggtatgccggcgtaaccgccacggcaaccataaccgaagaccatcgcattcgcctgtccaacggcgagatattcgatagcccatccggcgcgttccgccgcgccagaatgctcgaaaccggcgagaacaagcagatcaacggttggacagtgtggaaagtcgcggacggcagaaccttggacgaactgcggcaagtcagcaacaatatctcactgcggcgcagcttctggaatggcctgtataaatatgctgcaacgcggcccgactttgttgctgtatacggcgacccatccggtcgcaagacgaacagcgacacatggatcagcttcggcgtaggctcggggttctgccacccggatggagcgttgaatattcgagatggctacattacggtcgacctgtatttcatcgacacgttccagtacacgaaactttacggcatgaaggattccgttgaacggatgctgtctgctttgggcgaggcgacttgggacgagccggaagccgacaagaagaaccgccaccttttggtacggcatgatgtggatttctccggcggtatgacggaagcctaccaatggatgacggacgggttgctcgccatgcgcagcgtgtacgatctgcttgtctgattgctcgatctgctacgtgttcagcactgtatagaatgagcataaccgttcgaaaagaggccgccatgaaatacggaatgaggaaacccagctggaagaagagcctgtccgcgcgcacgaaaggccgtaccacccgcgcggtcaagaaagcgttgatccctggctacggcaagaagggcatgggctggctgcacaccaagcgcaagctgtacaacaccgtctacaagaagaccacgttcagcctgttcgacctgttcaagtaaccagggctaaagggggaaatcacatgtgttccaatccagacacgtacgagttccgactttcattagaccttcctcaacagagcgccgttcctactgatacgttttctgccttgcgggaaatccatgaatattcagcggagaacggcccgcgtttccacacggctgctgagatgtttgattctctgggaatatgacaggtcccgccatgcgaacattgcgcatggcgggatctggttttgtcgctgttgagctgtcggacactcaggcgagcatgacctcgatgttgttgccttccggatcgtgcacgaaggcggcgtagtaggtcgggctgtccaccgacttcgttcgtatcctcgttatcctcggcactttcgtcgtattcttcgctgaacgagtatcccagattgcgcgtcatcgcattctcgatcacgtcataggcccacatgcgtttgtcatcatatcgagcgaaagcgagcgtgctggaaatcaacagcatgctgttcagtggttcccattgccgcatgtccttgtcgttctcggcctgtgcaatggcgtccaacggcacgtagcgtttgagcagaccgtagacggagaaactggcggcgagcacgatcgccatccacgggaacgtcggtgactgcgcagtgaacatgcccacgcccagcgccacgttgagcagaggcgtagtcaggtacgcgattgaggtctgcagcgcctggccgttgaccaccagatatatgtacagcaaccaattcacgctgatagccgtggtggcggcgagttccagcgcgaacagccttttgctccgctgtgcgcgtcaaagcgcggcgatcgcgcgatgatatgcgcgatagcggcggaacgccatcagcagcgcaatcatgaccaccagcgtggcgatcagccgatacgccagcacgctgatggcattcatgccggacagcgcgtgccagtacagcggcagcacgccccagccgatattggaaacgagcagcgcggcaatccccatccgcgtctgctcgacagcacgaaccgaagtcatacccgccaccatagtgcctgatgtgccactgccgtgcgtgtgctcacacggcatttgttagaagctttccgggaatcgaatacaagttatccccgacccaatacggtccgattatctcagcaccgctcccgaatgaaatcgaagatcatatcgaacacctgcgggctccagaagtcgtgctcgtgttctgcgccgtcgaccagcaccagccgcgagtccacgccgtgttcgagaagcctcttgtgcatcttgaccgactgccggtaggggaccacggtgtcggcggtgccgtgcagcagtatcgtcggcggataggccaccccgtcacgcacctgcaggtacgggctcatgtcggccgcccggcggcgcacgtcgtcgctcaatccggtttcatgggtcgccccgaccactgcggcgaacgggccgaaatagtacagccggaacgggtcatcctcgttgccgaacgcgtcgatcgcctccatcatgtcggtgggcgggaagcagctgaccacgaagctcaccgcgtcgctttcggtggcataactgccgtcttcataccgcgggtcgtcggcagtgagccccaccagcagagacgtgttgccgccggacgacgtgccccagatgcccagccgctcagggtcgatgtgccactgccgcgcgttcgcccgcaggtaccggatcgccgccttgacatccttcagataggcagggaacacggcactggcgtcacgcgaggcgttgcgatggttcaccgtcgccaccacgaatccctctcgcgccagttcggatagctgcgggatctcgtaatcacggtccggtgtggtccacgcgctaccctgcacgaacaccacggtggggtagcggcggtcatcatcatcgccggtggattgcggcgcgatgatgtccatcaccagatcatcggccccggtgcgatacgccacgttgcgggtgagccgggccaggccggtgagcgtgggattattcggtacgtggacggtttcgacggttcggtcttctgacggcgtgatattcggcatgaggcaatgttacagcgaatggttctcaataagaaaggtgcgagtccattatgtgaggaaacgaacacggattacttcataagcccggtattttgccggtctctgaaatgttcgattgtgcggaaatgttcggaatcctcgcacttttcttattgagaacgattcgctgctacatccggaacgcagcgcgcgggtacgctaaactgtgtacagctcagaaactcaccccaaggagatgccatgaacccgagacgcgggccgatcgtcgcaggcgaaaagatccaattcaccgaccgcaagggcaagaagatcaccgaccagctgaccgccggtggcgtcacccagaccgagcacgggatcattctgcacgacgacgtgataggccgcaccgagggcgtggtcgtcaccaccgtcaccgccaagcgcgaggctcaggtcaatgcggaccatcccgaacgcgaccggaacaagccgtggaaggcgacccgtgcgatcggcggctggcagtatgcggtcatgcgcccccgtctcgccgactacgtgctctccatgccgcgcggcgcccagatcatgtacccgaaggacatcgcgcaggtcatccagctcggcgacatccgaagcggcctcaacgtgctcgaatctggtgccggatcgggcgcgatgagcgtcaacctgctggatgcggtgggggagtccggccgcctgaccaccatcgagctgcgacccgaattcgcccgtgtggccgacgcgaacgccacgctgtattacggcgaacgcccgcagtggtgggacctcaagaccggcgacttcgactcggtcgcggccggcctgccggagcactccttcgaccgcatcgtgctcgacatgctcgacccgtggaacaggctcgaacaggcgtaccgggtcatcgcgcccggcggcgtcctcatcgcctacatcaccaccaccacgcagatgagccgactcgtcgaggctctgcgcgaagccggccattggaccgatcccgccatccaggagacgctggaacgcacgtggaaggcgcaggggctcgccgtgcggccggaccatgcgatgatcggccacaccggcttccttgtggtctcccgcgcgatggcggaggggttcgcggccctgcgcaaacgcgaccgcgccaccaaggatacgaccactgacatcgattcgctcacccccgaacagcgcgaggcccagctggacgatctggagctgcgcgacatttcggaccacaagctgcgcaaggtgctgcgcgacctcgacctgcaaacgtcccgactgtcgcaggacgatcaggcctgcgagcaaggcgaggcgacggcgatctgacagcccaatcaggcgcggcgaatcttaacggcaggcaatgatttggtgatgacgggaagtcgagcgcccctcgtctgccacaatggaggcagtgacgtcgtacggaaaggtcctgaagaatgggcgtgaatctcagcaaggtcgagaaaaaggcgaagaactattcccacgtgctgctggtcatgcggcacgcgaaggcggaaccgttcaacgacaagggcgaccatgaccgcgagataaccgacaagggcgagaagcaggcgaagatcgtcgccaaggggctcgtcggcatgaaactgctgcccgaccgcgtcgcgtgctccggcgcggtccgcgcccggcagacgctggagagaatgctcaaggtgttcggcgaccatcccaaggtcgaataccgccaggccctgtacgacggcggcatgcagtccgtattcgacgagctcgccaacgccaaggacaagacccgggtcctgatggtcctcggccatgagccgaccgtttcggtgagctgccagtggctcgcctcctcggattcggacatggtcaagctggatctgctcaacctgggcatgtccaccgcctccgtggtggtgttcggctccgatcagccgttcagccgctggcaggtacacgacgccgagctgctcgccgtgctcagtcccaaggacttcgactagggatgacgcctttttgccggccggtctctctcgcgaacggtgacagccggcttgtgttataaccaccgttgatacgcgccaccttgcgcaggagtggcgctgaaccgttggaatactgcggaaacgtagacggcggaatggtttttatggtgtcgtacaggcgtaacgctgatactagttttccggctggaaacgtcgttttacgcccacttagagtgtgatttagagtggactccctgacacgggaggacagtcatggcgggcaagacgaaaaacaggaggaccggtggatccggaagcgtgttccaggactccaaaggacgatggcacttccgcaaggacatgggaaccgacccggcgaccggacgcagacgcccgccgatcgaagccaccggcatggtgaaaagcgaggcacgcgcccgtttccaggcgaagatagcggaatgggaacgggacggaagactgcccagcaaggacggcccgaaaaccgcggactacttcgaacggtggatggaggagcaccgcgcggccatcaatcccaccacctggcgcaatgaatccagctggatgcgcaccatgaacgcgatcatcggcgacatacgcctcaaccggctcaccgccaacgatatcaacggaatgtgcaggagactgcgccgcacacgcaaaagcaagaccgtcaacacctatctcgcagtcctcggcaccatgctccgaaccgcgaaacgggacggactcatcgccgacgatccgatggaaaacgtcggacgaatgccggaggaccggtacgaacgccccatcctcgacgtcgccgacccagcgaaggtgatcgaggcggcgctcgccgagcccgatccggcggtcgccgtgttcgacagcccggacgagcgtgagaagtgggcactcatgttcgaactcgccttcaccacgggcatgcggccgggggagaggtatggcctgatgccctaccagctggaactgcatcatggcgtgccgaccatcaacgtctgccagcaggccaagccgataccagccggcgccacgatcccggattggatggaagccgagcatctggatggggcgatctggctgaccaaaccgaagaccgccaaaggcgtgcggacggttcccattccgcaggggctttgggaccggctttgggcgcatatcgtcaaatggggcgtgccatcgcatggactggtgttcaccaatctttacggccgtccgatcaggcgggacaacgaggagaagcgttggcgccgcgccctgaagatggcgggactgccgtacgtcgacatctacagcgcgcggcactggctcgccaccgaactcgccgccgccggcgcgagcgacgaggagcgcaccgccatcatgggccacaccgacatccacaccaccagcgtgtacacgcattggagggaacagcggctcgccaagacgctcgacgccgccctgccagacctccgcgacggccagtgacggacggcgacggcttttcctcaacacgaaagagtattgacacaccccgcgctcgccggtagattgaagactgaaacgaggaggtgccgtggacgatgagcatgaagacgatgatgagaatgatgacgattccaggactgagcgggacgcatcagctggagaaccgtcgcatggagtcgatgaggaacgcgcaggcgaacctgtcccggcagacgagaagccgtctcgtgacgtcggcgatcagccggatgagaatggagaaagacaaggcgagataacgcagccggacgacgaggagctggtccgcgccatatccatgctggtgcaatccggaatctcggaatcctactcaggcatgctcccgcggccaagcgatttcaacaagtatccggctgacgtccaggaacgtatgtgcagatggaacgacgccttcacggtcgacgaatcaaaccggcagaaccagctcgtcaaggcggagatagatcagagccgcaaaggcatgtgggtcagcgcaggtttgttcgcggtcgcattgctgatgagcttcatatcgttcttggccacgtcgagtccatggtcgtttggtttcctggcggttccagtggcgaccataatcgccaacctgttcgagccgatcgcgtcaagaagcagccgagacaaggaaaaacgcaccgaacgcgaaccggggaaagaaggccgacaaaacgcgcgacgttcacttcatgaatgagacagaagaccccggcgctcgcggtatgtgggcggccggggtatgttgttattcgttcttgtttttgcgtggacgtccgccgccgacgcctcggccggggcggctggcgttccaccggtcgatggtctctggcagccagccgcgcgtgcggccgatcgtggcgtctggctggggtagtttgtaggcgctggccgcggcggtgctgatgccgagccgtttggccacgtcggtgacgctcatgtattcgatgcccatgtcatccctttcttccggcgatgagcgcgaagacggcgctgacggcggcgcatccggcggtgagcgcgaacggccagccgaaccatgcgctggcggcggttccgagcgcgaataccgcgctgactatcgattcggtcttcatgatgtcccatgacataatcggaggtatggggttccggcccctacgactggccggaaccctttctcacttttttctcttcggtttccgtctcatttccttgacgagtccggtaaccgccttgatgagggccgcgatgctcgcgacgagaagcgagatgctggtgatcatctccgatggtgtcatgttcacctcctttccttgatataaactatattagcacagtcaataaagtaatgcaagtcgggatatgggtcaaatcacgtgatttcccttgattttccaacgttttcgaagagtagaatattgaatatgaacctgctgaagagaaaaacacgcgaatcgtcggaaacgcagtccacgaccatggaggtttacttctccggaccgtcggtcgacgagcactccatgagcgtccgcgacctcgcgccggctcttatcggactggctgacgccatagataggtacaaggagctttcctgcccgttcgccgacctcgacgtgcgcatcaccgccaccaaggctggctccttcgacgtgatactgcagatactcggaaccgtcgtcagcctcggacagggcgcggaggccgccgacgtggtaaacctcgcatccggcatcatggacgtgctcaagatcctcctcaccagatacgagcagaccggaaccgtcaaaccaggcgaacacgaggtggtggagcggcacgagactagggtcgccttgcgaatcggcaagaccgcgaaactgaacgtcagccgcaaaagctaccgcgcctcatgcgatgggaaaatcatcaacgacctcggcaccgcaacgaaaccggcgtccgaggatggatacaaccccgtgcgcttcatccacaaggacagcggaagcgacgccgcgatacccggagatgtatccgaatcgatgagcgtcctgaccctctccgaccagcccatagaaccatccgtcgaaaccactacgctgcagatagacaccatccaattccagtcacgaaaatggaagttctccaaaggcgacgagaaattctggtgcgagatcgccgacgaggcattcctggcaagactcaaccgccacgaagtgtcgttctgcagcggagacctgctcaaagtgaaactggaaacggaacaatacgtgcgcgacggacgactcgaaaccggatccagaagaataaccaaagtgatagagcacatcccaatcgaacggcaacagacgctcgatatatgacacgaaaccccggcgctcgcggccatgcggacgccggggcctttctctactgcacgcacacgccggaatcgtacaatagctgccggtagtcgttcaacacctggatggtgacacccaattccactgccatcatccacgcattgccctcgtacaccgtctcggccatgccgtaatccaccggcgagatcaacgccaacgccgtctccctacggcaacggcgctcgcatctgactccgtattggctgccgcatccggggtcgtggtgtctggcatggatgagctcgtggcacaatgtgcagcggcgctggcgctggttgagccagtcggccaataggatgagcccgtgccggtcgtcgtacaggccgcatatgtcgcgtgggaggcggtacgacgctatcgtcagtcccatggattccgcgttcctatgaagctccgcgatggtcttgttatccacattcctctcttccgaaagtattgtttttcgagaagtactttttcgctgtctgtcaagttctatttgacagttggagtgtcgtatgtgatattcgaactagctcatctacatgttgtagaaggagtcttcggagtcgtccttaacgggcggctctagttttttattggattcttgtgctgaatctggagttatattccttttccagcttgtctatgctccattggcggtttacgtagtacgcggttatgagtacccagtaatcccttcgttctcctagaacaacgagatattgttggtttggaagatatatcttcactcgatccttgttcttgtcgttttttctccatacccaaggccgcgcgcattgggcgtatccgcatatttcgcagaacggatgatgctccactaccggtctgggccagctgatgcgttcgctgcgttcagcatccggaagccgtgagccggagtcgtcctgattgcatgtggtcagatgcatgaaggcttccggatagattccgtcgtagggcattcttttgtagtgtacgggtttcccgtcgtattggaaggactctctgaactcgttctggaatacatggaacagtcgttgctcatactgctcccatgtctctccgtgctcttgattccaaggaatcaatccgggcagccaatgcggattcatctcgccctccatacgaaatagttgaacttggtctccttcagcagtgtgctccggtctagtttgtatcccgaccgttgaatgattcgttcgatgattctgcgcttcgccatgctctgatgctgttccggcagttttcgctgcgaacggcatactgctccgatgagtatgtcggtgagctgcatgatctgtacttcgtcggaacgtatcggctggattttctggatgattctgtgatcgtaatcgtacatgttgttcgaacagacatcccataattggctgactcgaaaactcgagtgtgtgtctttgatgtcgacgaatacgttatagctttgccttggatcgaagacgaccttgagcatctcgaagtacattttgtaataccaggtgttgtggtcctgattgtatttctcgtggtcaagtagattcttgtccgggatgaggagcgctcggaacgatatgtcatcgtcatcgaagaagtagtccacgagatccagatagagcggcagcatacggtctcgtgcctttgcccatttcacctcattcgtggcgcatatgccatgtttctgcttgatttctttgattctgacgcatatctctttgcgttttccttttggcacaatgacggctcccagagccatgctgttcgaatcatcatgctcaaggtgacatgtctcgtcacaatacaggttgtattcggtcattcgtgttcctttcaatccatcaatcgtcaggcgtctcggcttcgaggcgtgcgttcggatccttgtttgcggccacgtcatagtcttcgtcgtgcgcggcgatacgatcaaccaggtcatccgagattcgagattcgcgctcgctgacggcttgagatgaaatcgatccgcatgctgcagctaccaacgaaagcgcatcgggaaggccgaacagtggtgcgaggcggtcaagctcactgattgcccagctacgcttaccgagtactcggtcgctgacatatcctttggaacgtccctcaagtgccttggagaggtcggcttgggttattcctttggcttccattgcctggctgatgtatttgcaaatcaccatgtcggtgcgtgtagtgctgctatccatactgatgactgtattcgaattttcgggaagttacatcttctcaccgttcggcgtgttgaagttgccataccgaatattcgggagtacattgtaagcatgttcaccgaatatccggtaaacatcgaaaggaatcccgaatattcggggaatggaggtgatgtgaccagcaatgaatatgtgacgcaggcaatcaaggtcaggatggctcgacttggaatcacccaatccgacgtcgctgatgcagttggaatcaatcgcgttgtcatgaatcggtatatgcgcaatcagcgtgaatggccgattcgagtcctcgacaagattgctccagcactgagatggagggatggtcttgacatttttatcgcagcaaattccgaagaaaaagattcagaggcaacactcataaaagcatgaacaggaaggagaatccagtggacaacgaaatccagcctttcgaattcgaaggcaacagtttcaggacgctcgccgatggcgacgaagtgatgttcgttgcatcggacattgccaagctgctgggttatggaaatgcgaaagacatggcgcgaaatctcgacagtgacgagaagggtatgcaccaagtgcctacccttggcggattgcagaaaatgacggttcttactgagtctggtctttatcgtgcaattctcaatcgcgaagccgcctatgtcaaaaatccggaagcgaaggcgttcgtgaaacgtttccaacgttgggtcacgcatgaggtgcttccccagattcgcaggaccggcggctacatcccgacgtccgagtcggattcagatgaggacatcatggccagggccgtgctcgtcgcgcagaagaccatcaaacaaaagaaccagcagatcgcctcgcagcagtcgcgcatcgtggaactggagccgaaagcgcggttcgcggacgccgtggccgcgtccgacggcacgtgcctggtcggcgagctcgcgaagatgctccggcagaacgggatggacatcggccagaacagactgttccgcctcctgcaggctgacgggtatctcggcaagtccggttcgaatcgcaacgtgccgacacagcgtgcgatggacttgggattgttccgcatcaaggagaccaccgtcacccatgcggatggtcacaccacggtcagccgcactccgaaggtcacgggcaaggggcagtgctatttcatcgaccggtactggggtcgcgctcagccgtcgttggaagcgggtgcgtgatgagcgtcagtcaattcgcgtgcctatcgggtcagctgctgtgcgtggtcgtgttgctttgcgcgattctcttgaaacttctgaccgtggtcaaggtgcttcatgacattctctgtgcgattcgttcagcccagacgcagatcgaacttagtccccttgcgagaaatcgtggggaattttggacaagggccaggtctttgttttcccgtggccgatgaacggctgctgccgccaggtgatcgtcaccgaagcgccttcgggaggtgtgtaatgcaggtacttatggccattttcctcggtctccgattccttcaccttgattcgcgcgtacacgcagccgccagtggcgacaagagagttgaagcctttccgccgtgatccataaggggtttcgggactgtgggtggccgttgcatgcacgtcggtggcggctccgttgcccacattgacgatcttgaccagaaggcacggaggatttccgtatcctcattcgaccacatagggctgccacttcggcctacttcgatatgcgaagttccaagccatagctcctccggtaaacaacgcggtcaagccttccaaaccataactgatccaatccatagttcttctcctaactgttcggcccgcacgtcgcatatgcgggatgacaccgattttaggagagggccgggcggttctcctaacgccgcccggcatcacacacgcaaaggaggcgcgtgatgggaaacctcaacattgagattcctgacgaggaatgcgtcaaactgttccgctacgaggatggcgacggtgtcgcggcgtatcttctgttgttcccggaacacgacatgaaagcggtcaagccgcgtatcgacgcgcagcttgaccacgagatggcgatgtcagtaaatgcgtccgacgctctgtttgggggcgtcgtcgatcgcccaccacagcgcgttggacgggttgatgtggatggtgtccgagctggtgcccttgacggatcctttgacggtcacgaccgtcccgttcctggccgcttccatcagatcctccgcaaggctcgctcgatcctgtccctcggcaagcttcacatggaccggttcgccggttcctgtgccgagcgtgagtctgtcactcataattcttctcctaaccgttcggcccgcacgtcgcaaatgcgggatgacaccgattttaggagagggccgggcggttctcctaacgccgcccggcatcacacacgcaaaggaggcgcgtgatggtcttgcagaacgagctcaaggatgcgagccgtatcccgttgaaggacaggctcgcatggacgatcccgcaggccgcgagcctgtacgggatcgactacgacggtctgcggcaggctgtcaaccagggcgacatagacacgtttcgtccgccaagcaaacgaggaacgccttcccgccgtcacatcaggcgcgaggagatggaccgatacgtcaaatcgttggaggagtaagcatgaacgacattcgcaaggagctgtgatgacactcaggagaatcgacgcggaaacgctgctgacaccacccgcaccgccgagggacacggtgatcatgttcggcttgaccggctacgcgattcgcgtcacgggcaagggcgccagcctcatggagctcgacgtcgacggaagccacgagctggcgagcatcggaaaagaccaggcaaggacattcattcaaagcataggaggcgcaagatgaccgacaacgactatcgcatcgaggacgggtccgaaaaggggaggccgaactacacgctgcgtcgtgtgaagttcgcggccgccgtggtcggcctggtcgtgagcgtgacgctcatgctcacctggcatggcggcggcctgacgggcgcgcttgtggttgagggcgtgtatctggccacggccctgtggctgacggtcaggttcgctccgcgcgatggcgtggatggcgacgtctgaccgtatccgccggcgtacaaggacgcggacggatggcggaggcgtgtgtcctttcatctcgcattgcatttcactctcacgtcttccgccgtccgctgcgggttcgaatcccgccgccggcgcttggccggaccgtcaacgccgcccgcatccccgtttcgttcagctttcctggggtgtgggaacgatgggcgcgattatttgctgtcatggcgcccagcggtccggctcatatcaatcaatctcatatcaatcaaggtcaagggaggaaccgatgaaggagattctgccgcattggcgtttcggtccgaactctccggtcaaggacgtcgacgagaagaggatgacgcgtggcgaccgggcggtggcggaggcgtgccgtcgggcgatggagggcgagacgtggaaggagctggtgatcttggaatcgttgggcgtgcgcttcaccgaactggtgggccggttcgtgtccgaggtcgcgtctcccgtgttggaggtgatgcctggcgacgctttccatcagggagcggccgcgcagttgacgcacatggtgaagaccagggatggtggcgagaccatccgcatcatcaagactctcgccgtgaaaggtaggctctgatggctggtgagacgatcatcacggtggtgggcaatctgaccgcggacccggaattgaggtcgacgaagaacggcaggagcgtggctggtttcacgatcgcgtccactccgcgcacgttcgaccggcagtcgaatcagtgggtcgacggggacgcgttgttccttcgttgcacggtgtggggtgatctggccgagcattgcgccaatagtctcgccaagggcatgcgtgtggtcgcccagggcaggcttacgcagcattcgtgggaggacgagcagcatcagaagcgttcctccgtggaattgcaggtggatgagatcggcccttccctgcggtatgcgacggcgcaggtggccaaggcgcagcggggtacggctggagcgtatgggaatccgtactccgctccggccggctatacgggcggggcggccgcttcgttgccgccgtccgacccgtggggcaccgaccaggccacgtcttcctcgtcgttcggctcgttcggacagcctgccgaaccggaattttagaaaaccaaaggatgaatcatgggcatcacgatagagaatctgcaggtcgacgacctgcacgccaatccaaacaatccacgcaagcaggtcggcgacgtcgacgaactggcgtcgagcatccgaagccagggcatcaaacagcctttattggtcacgccgacaggcgagacggacatctacggacacaaacagtaccgcgtcgtcatcggccaccgcaggctcgccgcggccagacagtcgggactctcgaccgtgcccgcgatcgtcgaggagatggatgcacgccgcgaacgcgagatcatgctcgtggagaacacgcaacgcagcgacctgactccgatagaggaggccgacggctaccaggggcttctcgatctgggcatgcacgtcaaggagatggccgagaagacgggacgcagcgaccggttcgtccgcagacggttgaagatagccagaatcccgcaggagacgcgcgacatgtccgccgatttcagccaactgtcgctcgaccagttggacaagctagccgaattcgaatccgaccccgacatgcaacgcgagctcgcacgcgccgacgatttcgaatggacgtaccgaaggctcgtcagcgaacgcggcaaggcgaaatggtgcggtgaggccgacaaggcgctcgcgaaggccggcgtcagggtcgagtccttcccggacgggaagaactattggacgttcgaaccgcgcggctacaggcggcataacatcatttcctccactcgggatccgttctggaagcagttcacgagcgaggacgggtggccggaattctgcgtcttcaaggacgacggcgactactgcctgtacgcgccgatcccactcgaccaggtcgaaagggaggagaacgcgaaaaccgaacgccaggccatcatggcacgggggaaggaactcgaccgcaaggccaagggcttcgaggcgatcgcgagggacacgcgtttcgcatggctgaaaaccaacctccacacgctcacccgcgaacagacagtggcgggaatctgcgaactcgcgatcgctgagacggtcggcaggcattcgacgttcgtgagccggccaatccatggcgagggtgtcgtggaggcgctcatcggttttggatggaatctgccgatcaccgagcatgacgacgaccactggtctttggaatgcaaggagaacctcgacctgatccgcatggtgttgagggacaggccgttgcggatcctcgacgtgctggccgcacgacaggaggacaacgccggctggcgtgcgtggcgcacgatgcgcggcgttgatgagatgcgcgtctggtacggcgcattggaactcctcggataccagcccagcgcggaggaacgcgaggcgctcaagggcgcgatggccgaaaaggagcaggaatcatgagcatgaaagcattggagtgggccatgtacgacgtgcccgccgaaatgaccaaaggatcgcttctccgcatcctcctcgcgctcgccgaccatgccgacaccgaaggaaacggcgcgttcccatcccagaaacgcctatgcgcgctcaccgggtacagccgccgcaccatccagcacggactccacgacctggaggcatccggactgattgtcaaaggcgaccagagactcaccgaacactacggacgccaccgcccgatcgtatggaacctcaccatggaggatttcaggggcgtaaaaactgcgcccctgaaaaagaacgaatccgaggcgcagcatactacgcctcaaaacagccaagaggcgcaattaggggcgcaaaaaacagccgttagaggcgcaattaggggcgcaataccactacgcccaaacctatataaggaagaaagttatatagaacctagagagagtaacgcgcgcgcgagaaaaccaatcccaataccagccgactggaaaccctctgaagaacaccgggcgctcgccgaccggctcggcatcgactgcgacaccgaagccgacaaattccgcgaccgcgcactcgactcgggagcccgctcggccgactggaacgcgaaataccgcaactggctcgtcaaaggcaaggaacgcggattcgccacgccaaaagattccaacgctcgccgacggttcacgtggggcagcgaagaggtcaaacgcgtgctcggcccgatagcctgcgaaggcacggacacgtacatggagctcgcatgcaaggtcgcggacctgctcaaccagggcttggacccggacatgctgcgccgtcagctcgcaaacgtgcccgacaatgtattggccgaacaattgtttgaacaggaggcggcggcatgaacgacatgaccatcgcacacatggccggcatcctcacctcggccatccaagccgccgaccgattggaactcgacgcgctcaaaagcccggcgctcgccgatatgggccttgaccgcatccgcgatatcaaacgcgactgctcgacctgcatcaacctgctcgaccagctcggaagggagcgacgatgagcgaccggcaattccaggaatcaaaacgcatcgcgctcgcacgtcagggctggcattgcctgcgctgcgggacgaacatccacgacccgtcactatggcctggacgcagtggccatcaccggcagttgcgccgtcgtgccgatcccgccgtgcgtgacctgccgtgcaacatcgtcgaactgtgcggttccggcacgaccggctgtcatggttgggcgcacgcgcatccggccgaggcggaacggttcggctacatcatcccgagctggcgggatccgctcagcgtgccgatacgcgactggaacggcgactggtggtggctgctgtctgacggcacggcacaacggctcacgcaaatcgaaatcatcgaatggcaaagcgattggaaggaacaatcatgaggaaacaagacaaagacctgaacgtgaagccggaggcgctgctctggctcgatttcgaaacgaccggtacggacagggatggcagtctgccgttggaggtcggcatggaatgcaccgacgtgctgggcgaacattcgtatggatccctgcatcgcatcatcagaccggactatctcgacctgttggacatgagcccgatagtgttctccatgcacacggacaacggcctcctgttcgaactgtcgaacggttccgccgggaacgactgcgtgggagcggtcgcgaacgccgtggaggagtatctcgaatccctgtcgcaacgcttcaccttggttccggccggaacgaacgtggacttcgacatcgacttcctgaaacgtctcgacctgaacccggacaggtggctgtcctaccgcaagttcgacctgaccacgctccgccgctacctcacgttcctggactgccacgaagacccatacaaaaagcatgccggcacgcacagggtgcgcgactgcatccgacgcgacatcaacgactacatccgataccgcaaactcctgaagggagcatggcgatgacaacgaagggaaaaaccacgaagaccgtatccaaggagacacgaccgcgcaaatggcgcaaaccagtgccatgcccgacctgcggcagccgaaacatcagattcgaccagtttgcccgggccatcaaccggaaaacatccgccatacgacagttctgggcctgcgtctgccaacaccaccacgccatcctcatcctcacccgccacgacgacctcaaggaagccatccgcgcatggaacaaggaagccaccagacaaggaaggaaacactcgaaatgagaaaacgcaaaccactcgcgctcgccggcatcggcctgaccgccatcgccatgttcctgctcacaccggtattcctcctcgcgctcgcgggatgcgggagcacgcctcacgagccggaggattcgaccacggaatccgccacccggtcgcagtgcagctcagactccagcaaattccagacgtgcacggtcacgatgccggacacgaggcgcgtcacctgcgtcttctacaacggctataccgaagcggccatgtcctgcgactgggcgcacgctgacggtgcggacaaggtggaggactgatcatggccgtcacgaaaagcaaggcggagatggtcgtcacgtggcacgagcgcggcgtcgacatcgagacaacatgcaggatgctcggcgtcaccccgcaggaggcgagcgcgatcatccgccagcacgccgcggagcgggagcgtcgggagcgggcggagcgcatgcgcccgaaattcatcgaaccgcccatgttctaggcgcctttatatgcccgtatacgtctaccgaaggagcgtaaaaatggatcggaactgccagaactgcgataagccggtcgaggagtcatggacgttgtgcaagacgtgccggcgcgggtacgcgcggctcctgcaccggctgcgcgtcaacctgtaccggctccagtcggtcgcgcgccgagaataccgtctcacggagcccggcaacggaggcaggccgcagggaggcgacgcgcccgcacccgtcgacctgcacgccgtcgacctgctcgaccagaccgagcaggccatcgaacaggcatgcgcggacgcgggaacatggctcggcaggtggcaatggctcgcaaaacgagcgccagtcatcctgcccctcctgtgcagggcgtcgaacgccggatggcacatgcggcgcctcacccgggcatgcgagcgaatcgagcggatcgtcgaccgcatgccacgctcgcgtaggatcgtcggcatgtgccccgaatgcggacgcgaagtcctcgccgcgaaaggcgagacgctgaggctctgcaaatgcggcaaccccgtcaacgtgaccgagctgcgagagcaaagccgagccaaggccgaagccatacacctcaccaaaaccccggcaggcatgagccaatggctcagggaaaactacgggtacgaggtcagccgcaagcaggtcggcaactggctcaaccgaggtaaactacccagctcgaaaccggtggaaggctatcccggctactgggagttcaacattcgcgagattctggcgatggcgatgggctcgagcacccgtccggcttgacgcaatatccaaaccgcctaaaaaataaaacccaaacgagggtaggtgaatccaccctgtggtatacttcgtatcaggattagtgtgaaagccctaggagatgcgctcttctagggctttcacatatccagccacaagggttcggggcgctgctgctcaaggcctgcgagcgcttcgcgcggacattcgacgcgggctagtccgcgtgcttgcgtggtctgcctccgccgacgccccgaccgggacgcttcgcgttccatccgtctatcgtctccgggagccagccgcgcgtgcggcctatcatggcgtcgggttcggggagcttgaggttgagcaggccgccactggttatgccgaggcgttcggcgacctgcttgacgccgaggtattcagtcgccatcgttgcgcctccagcccgcgaacaggccggcaagcccggcggccacggcgaatcccgcagccccgtagggttgtcccgacgccgcgaacatggcggatatgacggcgaacagcatgctcatgattcccaatgttcttgatttgctcatgatgttccatggaatataggattggcggaggggttccggctaataggtctagccggaacccgttttacttctttctgcgtttccgcttggaccggcccttcttgtcgggcttgtccctgcggacctcgacccagatggtcaccgctatggcggcccagctggtgatgagttgcatccaatccttgagttccatgttcacctcctctccttggctgacatatctatagtaacataactactatagatatgtaagcctcagacaccacgacgcgccgaagcccccgacgatggagaaaggtggatgccatgccctccgcgagccgacgcgagcgctggtacaccagcgacagacggcaccggctgccctccgactggggacgacgcaaggccgccgtccgagcacgcgcacacggcagatgccaggccgccagccacgcccccggatgcaacggggtgggtacggagtgcgaccacatcgtcgccggcgacgaccacgacctcgacaaccttcaatggctgtcgcacgaatgccacaaagccaagaccgagcgggagaacgccgaacgcaaccggcggcgcaagctcatgagactgcatccgagcgaaagacaacccggactgctagactggacgccacgccgggtgggaggggactccccggcgacaccggtataaccgccggatagcacctccggttgtgcatgcgcctgaaatccccgtttttcctcctgcgtcgttttccgccggtcttgtcccgttcgcccctcccgtggccgtttcctcggctcgctggggccttccacgttcgcgcgacgctttcctcgccgtccgtctttcacctcttcaagccatgtcacgttatgaataaaacgttggaatatggccattatattgttttttaagcgatgtcacgatatagtggattgtgtgaacgggacatgcgaatactgtggaagcgcgatggatgcggcaggacgcggcaggccgcgccgctactgctccgaccgctgccgcaccgccgccatgcgcgagcggcgggccgggcgcaacgcgataccgtacgagatgacgcacgccgaccggtggctgcgctggaagcgcgtcacacgcggcgacggcaccaccaagcggcccatcaccatcgcgggccgtcccgcgtccagcaccgacccggccacatggtgcgcatggtgggacgcgctcggctccacagcgggcgacggactcggattcgcactcggcggcgggttcgcgtgcatcgacctcgaccactgctacgacaggcgcaaccacctgacggactgggccaaaatgctcctcgcccccgtggaaggcagaacctacatcgagaccagcccctccggcgacgggctgcacatctggggacgctgcgcgccccgcgccggcgtcaggacgcgcgggctcgtcaccgcagaggcgtacagccgcgaccgctacatgaccgtcaccggccgcccatggcaccacgcgccggccacactcgccgacctcacgttcctgttcgacgtgatcgaaagactccgatagacgggaaggagacaatggcatgcccacgccgaaacccaccaagcaccgcatgcccacgggcctgacccgcgacgggcgcggacaacgcctatggcgcgacctgaccgacagatgggaattcaccgaagccgaataccgcgacctcgaaaacgcctgccacaccgccgaccgcatcgtcaaggaacgccgcgccatcggcgacgactacaccgtcgaaggcagccagggccagatcgtcgcccacccgctcctcgcccagctgcgcgccgacgaaaaccacctctccaacctcctcaaccggctcgacatgcccgaacccgaagaacaggccgccgccgacacacccggaacgagaagcgcccggatgcgcgccgtcgccgactcccgctggagcaaggcgttcggctgatggcacggctgcgcaacgacaacgcggccgcactgatccccgacaggacacgcgaactcgccgagatcgccgactggtaccgccgcgcgctcgccgacgagccggcgcgccgatggaacacgggcccgacgctcatcggccccacgtggaagcgcggggcggacggcggctggctgctgcccgagcacacgctcggatgggatttcctcgcgtggtgcggctactggctgcgcgactccaaggcgcgcaccccatggaaatggacgctcgagcaggcgcgcttctggctgtggttctacgcgctcgacgacgagggccgaccgttgcacgacaacgcggtgctccaacggctcaaggggtggggcaaggacccgatggccgccggcggcgcggtcgccagctgcttcgcgccgctcaccttcgaccactgggatccgcgcaccggcgagccggtggggcgtgaggagccgaacgcgtgggtgcaggtgtgcgccgtcagccaggagcagaccaagaacaccatgaagctgctgccgggcctgatccccatggagaccagacgccactacggcatccagctcggcaagctcaacatgtacgccctgggcgacagccgccagatcgaggccgtcaccagctcgccgctcgccctggagggcggacggcccacgttcctgatccgcaacgagacccagaactggaactcgtcgaacggcggacacgacatggacggcgtgctctccggcaacgcggcgaaaagcgccgacggcgtgaacgcgaagatgctcgacatctgcaacgcctaccgggacggcgaggacagcgtcgcgcagagggtgcgcgaggcgtgggagggcacgcagggcgaccccgacagccccgacaaggggctcaggccgaaatacatggacttcgggctgctctacgattccatcgaagccgccccggacacccccatgaccgaggaatcgatccccaaggtcatcgccgacgtgcgcggcgacagcgactggctgtccacgcgacgcatcctcaaggagatcatcaacccgaagaaccccgtcagcgaatcccggcgcaaatggttcaaccaatgccaggcccccgaggacgcgtacgtcaccagccaggaatgggacgccaacgagcatcccgaactcgaactcggggacggcgaggccatcgccatgttcctcgactgctccctgaccgacgacgccaccgcgctcgtcgcatgccgcatctccgacgggttcaccaagccgctgggcctgtggcaacgcccgcccggcaaacgcggcgacgcatggaaggtgccgcgcgaaggcgtggacgacaccgtacgcgaggccatgcgacgctaccacgtcgtcgccttctggggagaccccagccacgtgctcgacgacgaaaccggactgcactactgggatcccctgttcgacgcatggcaccgcgactacgggcgcaggctcagactctgggcgcgccccgaaggccgggaccggcacgccgtcatgttcgacatggcccgcctcgacgtgcagaaacgcttcgtcgcctacgtcgaccaggcctacaccgccatagccgacaaggacttcccccacgacggcgacgcgcgcctgcgccggcacatgctcaacgcgcgccgccaacccacccgcgccggcatgagcatcgccaaggaaggccgcgaatccaaacgcaagatcgacctcgcgttctgcgccatcgccgcccgcggcatgcgccgcgaatacctcaacgccagaaaacaaggaggcggacagatatggtgaacgcatacgaaaacgaaacccaagcgcgcgccgccctgaccggccaagcgctgccggcctggaacgcggaactgccccggctggaccgcatcgaccgctggtggcggtggaaccccaagcccatccggctcaagaaggccacggccgaacaccgcatgctgcgcgacatgggccacacaccatggctgcgcctcgtggtcaccacgctcgcccagaccctctacctggagggcgtggacgtgcccggcgacgacgacaaccacacccgcgcacgcgaattctggcaaccatgggaccgctcgcgcatgaccgcccggcagatacccctgcaccaggccgccatcgcctacggcaccgcctacgagaccgtacgcgccgccgacgggcccgacgggatccgcgcgcgcatcgaatgctggagcccgcgcgaggccatcgccctgtacgacgaccccgcccgcgacacatacccccagctgttcatgcgacgccgacgcctcaacgaaacacgcgaaagcctcgaactgtgggacgcatacaacatctggacatggatccacgccgacggcgcgtggacattctccgacgccaccccgcacaacgcgaccgacccgaacggacaacccgtctgcccagctatccgcttcaccaaccagatcgacctcgaaggacgcacccccggcgaggtcgaaccctacatcgcgctcgccaaccgcttgaacaaggacaactacgaccgcatgctcgcccagcactacaacagctggcgcgtgcgcaccgccaccggactggacatgaccgaactgtccgacgcgcaacgcgaggacaggaaggccaaactcgcgcaggaggacatcctcgccggcgggccggacgtgaagttcggcaccctgccggagacctcgttggacaacctcgtcaacgcgcgccaggccgacgtggaggaactcgccgccgtcagccagacccccaccaccgcgttcggcaagatggtcaacgtcggcgacgcgggcatcgaggaatcccgcgccggcttctacgcgaaacgcaacgagcgccgcaagtcgttcggcgtcggccacctcgacgcgctgcgcctcgccgccggcatcgaaggccgcaccgaagacgcggccaacttcgacctgacccccttgtgggaggacaccgacacgcgcaccgtcagccaggccgtcgacgcgctcggcaaggccagcaagatgctcggcgtgccgcaggaggagctctgggacatgatccccggcgtcaccaagacacgagccgactcatggcgcgcatggaaggagaaccatcccgacgcggacgccctggccgttcaggcgtacgccagccagctcgcgccggccacgaccggaggcgacgatggcctcgaccggtaaaggcgcgctcctgaccgaccaacaccgccgacgccaagtcagcctcgccatcaccgccgacagccaggcgcgacgcgcctgggacgccaccctcgacctcaacgacctcaccggcacgcagccgatctggaaacgcaccatgctcaacctcatacagacatggtggcgcatcagcgaacaggccgcgctcgcatacctgccgcaataccgcgaggcggaaaccggcgaaggcccgggcatcgagatcggcgtgcagcagttcgaccgccggcgtgccggcgaaaaactcgactggctcggatccacgaacgtgaaatggcacctcgcctccggagacacccccgaggacgcctaccgcaaggcacgcgaactgttcctcggcgtcttccacgaggccgtgctcaccggaggccgctccgccatcgaacactgggcgcaacaggacacacgcgccatcggatggcggcgcgtgtccgacggcgacccctgcgcgttctgcgcaatgctcgtcacgcgcggccccgtctacaccaacgcgaagaaagccggcctgcgcgccagcgacggcaagaaataccacccccactgcgggtgcaccgtcgaggtcgtctacggcgactgggaacccacccagcaggaacagcagtggatcgacgaatactacaaggccgccgaaagcctgcccgaacgaaccccgcgcaccgcacaggacatcctgccgatcatgcgccgcaacggcgcgttcagggactcccgatcgatacgcggaaccaaaacggcgctcgccgcccgtcgggccgaacggtacgacaggaagatcgccgggctccgaggcaagacgctgaaccacatcctgcgaggcgaaggcgacggcagacgcggcggccacctgtacggcaccggagtcgccgggaaaaccgaattcccgcggcaatgggacgaacggcgaatcgccacggccatcaaccggaccatcgaaacacccgactggcatatcgacgctcccgattctagggcgttgcatcgattcgggaaaaccatagatggggtccagatcgaagtcaaggcgtacctgcaggacggcgaatacgtcatcgaccgcgcatatccggtcggaggcgaaggcgtgaccagaaacaccgaaaacggtagaatcgatgtgaaggcaagccggtcgaagaagtggaggcaaccatgagcgccgcatcggagcgcatgacgcgactctccctcgaatcactgaaggtcgtcgaaggactcaacccggacatcgaggaagacgccatggaggagatcgactgcggcgaatgggacggggcaatcatggatgcactcgatttggcacacgaccgcaaggacctgtggccgaagttccccgaagaggtcaaagccatgaccagagaccccgaatggccagacctccaccgcttcgcatacatgttcgaccggacgtaacgcgacaccggccaaccaaacccaagccatccgcaccacgggtggcttttttcatgcccaaacaccattcgagcagatcgtgtccgactgcgaaagcaagctccaaaggccgaacagtcgaatcagggagatcatcctgcacaaagacgggactatagaacggcgtctcaaagggtataataagagttagaaggccggtgccttccaccctttaaaccttttggtctggtggaaggttcccggcctttcgcctttccgaatcataattcccaagccactgtgaagttcatggtggctttttcttatgcccgcaggccgggcggaaaggaaaccatcatggcagacgacaccgaagaccagggcaaggagcccgataccgacgctgccggcaacgagccgaaccagcctacaggcgattcgggccaaaagccgccatgggagcgcgacggtgaggagttcagcccggagaaggcgtggaatctcatccgcaacctcagggccgacaacgccaagctcaaggaaagcgacgacgcgaaggccgtgaagctgcgcgagatcgaggacgcgaacctcagcgagaaggagaaggcggaccgcgacctcaaggaggcacgggagcagctcgacgcgatccgcacgcagaaggcatgggccgaggcgatggcagaacaccagtgcctgaccaaggaggacttcgacctcatcggcgcaggctcgccgcaggaggtcagggaaaaggccgcgaagctcgcggcgcgtctcgacgcgcaggccgtgtcgaagacggactccaaccacatcaacccgctgctgcgggccgacccgaccgggggcacggatccgacttcgaagaagacggacgactggatgcgctcggcgctggccagatagcggcatcaacacatcaaaggagacatgatatggcagacaatttcagctcgcagatcctgcgcggcgacttgggcggcgcgctcatccccgacgagatcagccaggagatcatccagacgcttccgcagtccagcgtgctgcttacccgcgcgcgccgggtgccgatgagcagcaagaagaagacgcagccggtgctcgcctcgcttcccgaagcgtactgggtgtccgaaggcggactcaagcagacgtcaaagaccggatgggaggacgtgcagatcacggccgaggagctcgcggtgatcgtcccgatccccgattcggtcgtggacgacgcgaagatcaacctgtgggatacggtcaagccgctcatcgccgaggccatgggcaagaagatcgaccaggcgggcatcttcggcgtggacaagccgtccacatggggcaacgacatcctcgccggcgccaccgccgccggcacgaacgtcgcgtccggcaccggagtcgacctcgccgacgacatcgccatgatcggccagaagctcagcgagaagggcttcgcggtcaacggcttcgcctcccagcccggcctgaactggcagcttgcccgcctgcgcgacgcgaacggccagccgatctacacgccgtccgtcgcggccggcaaccccgccagcctgtacggctacccgctcaacgaggtcgccaacggcgcgtgggacaccaccaaggccatgctgctcgcggccgactggacgaagttcgtggtcggcgtgcgtcaggacatcacctacaaggtcttcgaccagggcgtcatctccgacaccgcgggcaacgtggtgtacaacctcatgcagcaggacgcgcaggccatgcgcgtggtcatgcgcgtcggcttcgccgtcgccaacccgctcacccgcatcgcggccaagggaagccagtatccggccggcttcctcacccccgccgcctccaggaaggcgggcaagtgatgaccgccaaacaggtcaggttcgtcaccaacgacgaaccgtttgacaaccagaacgtcgccgaactggccgcgttcgacgcggccggcaaacccgtgaccatcaccggcggatccgcgccgaccgtggacaccctccacggcgcgaccgacaccggccgggccgtgatgaaggccacgaacgccgccgcggcacgctcggctatcggggccggaacgccgtacgcgctgcccgccgccggcaccgccatcggcggagtcaagaaggccacggccgtcgccgacctcgcatccgccgcggacaccgccgccatcatcgccacggtcaacgccgtgctcgccgcattccgcgcgtccggcgcgatggccgcgcccacgtccgccgaccagccgtccgaagtccagtccgcggcgatcgtgacgccccaacagtagaggggacgctcccatggccgaaaaaccaccgttcgccgaaccggacgcgctcgccgaatggatcggcgagggcatcgacgcgacctcggcggactggaaacgcgcccgccgcgtgctgcgcgccgcctccaacctcgtacgcacccagaccggccgcgactggctcaacgacgacgggacgctggacaacccgctgcccgaacagctggtggacgtgaccgtcgcgtgcgccgcacggttctacctcaacccgaacgcggagacgcagtggtcgaggcagatcgacgacgcgatggacggcggcagccgcaaggtcgacgagccgggcatgagcctgaccgccagcgaaaaagccacattggccaagctcatggccgacgccagtccgctcatcgcgggcgtcggcgtcatctccaccacgcgcggggaacatgccagccaggacatgtccccgtactggtcggaggacgacggccggcccggattcctgcacgcgaggctgaccggatgagcgcgggattcagcccggccagcctcagacggctgcgctcctgggcgaccggtctcatgaccgacgaatgccggatcgtcagtcacggcaggcccgtcacggacccccacaccgggaaggcgaccagtcccgaaacggtccggtacgagggccggtgcaaagtgcagaccagcggcggcctcgccgcagagaacacggagggcggcatcgtccaggccttgggcgcggtcacccccgtgtggtcgctctacctgcatctgccctacgggaccacgggtctctctcccggcgacgtggccgagatcaccgcggccacggacccgaacctcaagggcaggaagttccggctgctgaacatgcagtccgagaaaacgcacgccaccgcatgccggtggaacgtcaaggaagtaggcaacagcaatgagcagtgacgtcacgatcgacgccggcgagctgaccgcgttcggccgccgggtcgccgccgctcacgcgatggccggggtcagtatcgccaaggccgtgaagaagggggctcaggtcgtcaaggagaaaacccaaagcgacctgaattccagcagcaacggcggattgcacgttgttcgtgtgagatacgagttggggaccaccggctcgcagatatacgcggacataggccccgaagattccggcaaaacccgcgaacacgggcacacgggccccactgtcgccgcgatcgccttctacggcaccgcgcgaggcggcggaacgcacaagccccccgagcattacgccgaagaagagttgcccacgctcgccgaatacgtgggcgacgccgccgacgacatgttgataggagccatcggattatgagcgtcatggacatgacctccgccgtgctcggcatgatccccggactcgaccaacccgtgtacctcaaccaggagccggacgaatccgagatgccgccgtgggtcatcgccacctgcaccacggacggccaccggtctaccgaggcggcacggtacacggcccacgtgggacggctggagatccgggtcgtggacctgacggccgacgcggtcaacgtcatctgcgatgaccggatcatccccgcgatgaaataccgggtgcccgcgaaaacctccgggttcacggtcgggcagctgatcctcgacgcggattccggcgcgtacgcggccggcctgaccgccgacgacacgtcgcgccgctatcaggtgcgcgtcctgcggttccgcttcacgtggacccgaccatagtcaaccaatcatttaccagaagtcttcaaggccatcccatacgaggtggcctttcccatcgaaggagaacatcatgaccctgaaactgggcaccgagatccccggcacgagcgccgagggcaacatcaccacactgtgggtgccgaccatcgccgacatcaagcgcccgaccatggccgagctggaagcaggcaccgacatctcgaactacgtgatgctcggcggctggaccttcgagccctcccaggacaccgtgagcgaccagcgcgagaacagcacgcaggacttcggagcacccgggcgcaagagcgccggcgacatctcgatcgaggtgatcgacaacacgaacacggagcacgcggaacagaacaaggccgtcacgctcatggccgaaggcagctccggattcatcgtgcgccgtcgcggcatggccacggacgcggccctcgccgcagggcagaagctcaccgtcgtgagcgtcaagtgcggcgagaagaaggtcctcaacccggacgcgaacaccatgatccgaagcaccatccccctgttcgcgcaagcgccgggctgggagtccgaaaccgccgagatcgcggcggccgcggcctcacacgcctgaccatcattcttccgtgcgggctttccgcattcctttccccgcacggaaccccctcatcaccaaagggacgcgaaaccgagacaaggaacgcaccatggcattggaagtcaagcgcaagcgcgtcgaggtcgacctgatcctcgaccaggagaaggcagaacggatctcgcagctgggcgagcagctcgcccgggcggcggcatcgcacgtcaccgagggcgcgaacgccgcggccaaacgcatcgccaaacagatcgacgagctgcgcgaggaggtctccgggcagatcgtgcacctcacgttggaggccctgccattgtcgcagtggaggcaggtgctcgaggcgaacacgaccaccacgaaggacgggcgcgccgcgcagcgcctcgaggacatcaccgccgacgcgctcaggctgatgatccgcaagagcgtgccggaaacgcccgtcgaggatatagccgccatcatccccgaactgtccgacgggcagctgtcgcccgtctggtacgccatccagaacctcaacgcgaggatgatcgacccaaaagactacctcggccaagcctccaggataatccggggctcgtccgggaactgaggatctgcctcaagctcggcatcagctacaagcgctggctcgggtgggagccctcctatcgcgtggagcgcgatggccaccggcgcatcaccgggtacacgccggaaagcgaatgggaccagaccgaacgcgactggatgctcgccctcgacgactacgagcacagcctgtgtccgcgctgcggcatgcccgtgagcgtatgccacgacgaactgacgcccacccggtacacggccgaggcgggcgtgtgccagatcagcctcatgcgagacatcgccgccgaggactggcgcaaacagcacgacggcgaggcgggcatcaagaccatgtcactgaccaccgccatcaaggcaagataaggagaccaccatggcaggcggactgaaccgcaacatcaccgtccgcctgctcgcggacacgtcgaaattcaccgccggcatggccaaggtgtccgccgaggccgagaagacctccaccaccatggaggcgtcgggcggcaagacgaagctcctgaccaccggaatcgccgccgccggcatcgccgccaccgcattgggcgtcgccgccgtacgcatggccgccgacttcgacgccggcatgtcgaccgtccaggccaacaccggagccagcgccgacgagatgtccctgctacgccaggccgccatcgacgccggcgccgacaccgtgtactccgccacggacgcggccgacgcgatcaacgagcttggcaaggccggcatgagcacgtcggacatcctctccggcggcctgaacggcgcactcgacctcgccgcgtccgacggcatggaagtcgccgaagccgccgaactcatgagctccgccatggcccagttcaacctcaccggagccgacgccacccgcatcgccgacgccctcgccgccggcgccggcaaagcgcaaggctccgcccgagacctcggctacgccctccaacagtcaggcatggtcgccaacagcttcggcatcggcatggaagagaccgtcggcaccctcaccagcttcgccaacgccggcatgaccggatccgacgccggcaccagcctcaaaagcatgctcatcgcgctcgccaaccccaccaaaaaagcgcagaacctcatggacgaactcggcatcagcgcctacgacgcccaaggcaacttcatcggcctcaaagccctggccggccagctccagacccagatgagcggactcacacaggcacaacgcaaccaggcgctcgccaccatcttcggctccgacgcgatccgcgccgccaacgtgctctacaacgagggcgccgacggcatcgccgactggaccaagaaggtctccgattccgggtacgccgcccagcaggccgccgccaagaacgacaacctgcgcggagacctggaaaacctcagcggcagcttcgagagcatgatgatcaagctcggcgaaggcgggcaaggccccctgcgcaagctcgtccagaccatcgacatgctcgtggacggattcgggcaactgcccgcccccgtccaacagaccatcgtcctctccacggcgctcgccggaggcatcgtcgcgcttcaccgcgcgatggcaccgttgaattcaagcagcagccagctgtcaaagaatctcggcatggttctcgaccccggccagcggcttatctccatgagctcgcaactgtatacgggcgccacgcaaatcggggcggcgttctcaacccagagccgtcagctggaggttttcggcagcaccgtcagtcgcacctcaggcgtcatgaccggattgaaaaccatgggcagcggcgtcatcgacctgctcggaggcccatggggcattgccataacggcagccggtctcgcattgttcgatttcgcgcaggatcagcaggccgccgcacaacgagtggacgaactcacccaagcgctgcagagcggacagaccgcggccgaatacttcggcaaggcactctccgacagctcatccagccgatacaccgacgacttcctcagccgatgggccagcggatacgacgacatcgccgaagccatcgaccgcatgggcatcagccaccagacctacatcaaagccatccaaggcgacaaggacgccatcgaacaggtccacgcccaggccgacgaatacgcggccagcctcaacctcatcgaccaatggtggaacaacccgtcaagcgccgcctacgaggcgctcgccgaacagcagaacgtcttcaagcaggcgaccaaggacgcggccgaggcggagaaggccgcgaccgaggccagcatgggcaggaccgcggccctcataaccggcaacgacgcgctggccgggaccgccgacgcatccgccaaggccgcggactccgacacgatcctgcaggagagcttcggcgcgaccaaggacgcggtcaacgagacgagcgccgcgctgggcgaggtcatcgacgcgctcaacacctactacggtttcgcgctggacgcgtccaacgcgtctatcgcgctggaatccagcttcgacaaggcatccgaagcggtcgggaagaacggcaggacgctcgacatcaacaccgaaaagggccgcgacaacacgagcgccctgaacgacgtggccgaggccgcgcagaaggccatgctcgcccacgcgaagaacggcgagggactggagcaggtcacgcccatcgtccagagggcccgcgaccagtacatccagctcgcccagcagatgggcatgagcaaggaggaggccgaggcgtcggccgacgcgtacgggttgaacaccgacaagctcagggacctcatcgtccaatcgagcatcgcaagcggacagaccggtgacctgcaagccgccttcgaccggctcggattgagcaccagcgacgtcaagctcaaggtcgacaacatggtcggcagcatgcgcctcataccagcggagaaaaccacgaccgtgagggtcaacgacctcgcatcgaacgcgatccacaccatccgggaaggcatcgagctgctgcagtccaagaccgtcaccatccgcacgaacgtgatcacgaacgagacgacgatccgcagcacgaagggctcgatgatcggccgtcccacctcctacacgggcggctactactccggccccggcttcgcgatgcgcggctacgcgtcgggcggcgtcgtggaggggctgctgcccggcactccgcccctgtcggcgcaggctgacaacatcacgctcgccaacgcgaggctgcgcagcggcgagttcgtcagcaacgataaaagcgtccgatattacggtgccgacacgtatgcggccatgaaccgccgccagcttccgagggagatgttcacgggcggcgcggaacagccggggccctcggtggcggacatctcccagggcgtgatggacgcgctggaacgcacctcggtcaccctcgtgttcgacgaccgcaccgtcgcggcgcggctcgcccccgcgatggacagggaactgggacgaaggaaaggaatgggactgtgagcgtcttccaacgcatgccggccgacccgctcatgcacatcctcctcgacggcaggccgctcgactggtacgggctgtccgccacggacggcgtcctcgccatcgaggcccccgacctggccgtcgcataccagagcgcgcccggcatggccggaagccacgacgtgaccctcgacgacccgctcggctgcgcgtaccccgggctacgaaggatcgcgctcggcgtggtgaccgtcggcgaggacgacgagatgatggacgcgcgccgccgcctcggctcgctcatcggccgcagctcgacgctgtcctaccgggagctgccggggcagtggcggggccgcgtcacgatcaaggactgggacgaacgcatgctcggaccatgccgcgtggactgcgccaccacgatcgtgatggacgcatacccgcacatcatgggccgcgcccagcgtcacacgctcagggaaggcgccaacctcctgcgcgtcaccggcaaccgtccggcatggccggtcctgacgctcacgacctcccgcgccgtctcggccctgtcgatcagggacgggcgcggccacaccatcggcatccggccggccgccacgctgccggccggaacgagcgtgctggtcgactgcaaggcgcagacgacgcgcgccaacggcaccctcgccccggtcagcctcgacaccgactacttcgccctgctgccgggcatgaacacgctcaccctgtccggcgccgccggcagctgcgagcacgaacccgaatggatgatctgacatgttccacgtcttcgaccggtggggcaacccgaaacccgcccccatgaccgtcctcgccgcccggcgcacgcagaacgtggacggcaccgacaacctcgacctgctcagcgacctcgacctcgaaaaaggcgaccgagtggcatggcgcgaccacatgggcctgtggcgagaatggctggtcaacagcatcgatacgtcacgttccgaccggctccccctgtccaccgcgcattgcgtcgacgccatccaggaactcgcctccacgtatatcgaggacaaacgcaaccggacggccaccgcctccgcatgcgcgaaaaaagcgctcgcgggcacacgatggattctcggcaccgtgcacgacggcaccaaaaccaccgaggcagacctcgcgttctaccacaccaacgcgctctccgcaatccaggacatctgcgccacgttcggactcgaggccgtcaccacctaccagcccgacgcgacgggcacgcgcatcgcgacccgcaccctcagcctcgtcagccggcgcggcgcgaccacccccaccaaacgcttcacctacggcaaggacctcgcctcgatccgccgcaccatcgacgccacccaggtcgccacacgcctctacggatggggcaaaggcgtcgccacgaccgacgacgatggggaagagaccggcgggtacagccgcaagatcagcttcgccgacatcaacgacggcaaggcctacgtcgaagacgccacggcactcgccatatggggcatccccggccccaacggaacccgcatccacagcgaggcagacgcggaattccccgactgcgaagaccccaaacaactcctgacgctcaccaaggaagcgctcaagacacgcagccagccggtcgtctcatacgaatgcgacgtcaccagcctcgccgccgccggcgtcaacgccgaaggcaccgacatcggcgacaccgtccacatcatcgacaccagcttccccacgcccctgcgcctcgaaggacgcatcctgcagatcgaacaggacctcaccggcgaccagaccgccaccaccatcaccctcggcaacatcaccacaggcatcacccaccaggacgacgcatggcgccgacaactcgaccagctcatctccaactccggcgcatggaacgacgccgccaccggcaccaaaccatacatcaccgacctcatcaaccgcatcaaccagatcatgaacacgaccggcggctacacatacctcaaacccggccaaggcatctacgtgtacgacaagcccgaagaccagaaccccacccaatgcatccacatcggaggcggatactggcgcatcgccaacagcaagaaggcgaacggagactgggacttccgcgcgctcgccgacggcaacggcatctacgccaacgccatatacacaggcaagctctccgatgccgccggccacaaccaatggaacctcgacaccggagaactcaccacccgcggcatgaccgccaccagcatcaccgccgaaggaaccttcgcgtgcggcagcaaggactggtacggcatcgagctcaacagcatcggacagctcgccggctaccgcaagggcaagaaggtcggctacatcgactactcgggcggcatgtacgaggtatccaacccgtcgaaggtctactacgggctccaactgcaaggcggatgcctgcgcatcagcacgcccatcctgtccgtcgccaagaccaccgacacccacgtcaccaccacacacgcctacaacggcaaacaccactacatctccaaaatcacatcctcctcggacggcaccatcacctggtaccaatcaacgaccgagtacatcaacggattctgcatcaactgaaaggacacccatgccaaggatcaccagatactgggcgcacgaccccatcggcaacagcgagggcatcctcgccggctacgagcccgccgcgctcaaggccgcgcaggaccggggcatcatcttcatcgccgaactcgacgacggcacccgactgcgcgtcgacgccagcgacgtcaccgaacccgaaccagcctcgtacaccatcgccacacccgactacgtggccagccgcgtcacgctcatcacggacgcgctcgacgccgtcgccgacatcctcgacccccagccggcacagacggcgctcgccacggccaaagacgccgccgcggacacctccggagacgacacgcgccgacgcctgcgcgacgccatcgcccacctcaacgacctcacgaaaggaacagggaaatgaccctcgacggattccgcgacgtcaccgagacgcccatcagcctcgacttctccaacagctggatcgccgacatccgactcaacgccggcgacaaggacggacgcaccatcaccgtcgccatcaccgacaacggccagccaatcacctccacgaccggcatcacaagcgtggcgctcgcctacaacaccgcgccgggcgtcgaggtcggcgaccgcgtgcccatgacccccgtgagcgggcaggcgaccgccacataccgggcgacgctgcccaggcgggcgatcgccaagcccggcgtcatcgccctgggcgtggaggtcaccaccgcggacggcgccaaggtctgctcccgcaacttcaagggcgtgatcgaacgcgccgtatgggacgccgaaagcacccaggggcaggacagcctcacccgcctcgaacagctcatcgcggacggcgacgccgccatcacccgcgtcaacaacgccatcaccgacgcgaacaacgcggtcgcggccgccaaccaggtcatcgcggacgcgcgcatcaccggcggcaacaccaccaccctcgacccgaaccagccggccacgtcctcgctgcgcggcagcggcctgcagcacatcctcgacctgtccatcccgcgcggcgcgggcgtcaccagcgccggcgccaccaccctggaccccaacaagcccgccaccgcgagcatgctgcaggccggaagcaagggcgactatacgctgatggtcggcgtgccacgcggcagcaggatcatcggcgtgggcgcgaacaccgtcaacccctcccaggacgcgggcgccagcatgtccaccgacggcgcgggcgacatgagcctcatcctcgacatcccgcgcggcagccggatcgccggcgtgacggcccgcaccctcgccaccggcgaggacgccaccgtcaccgccacccgggacgcggccggcgacaccacgctcgcgttcggcctgccgcggggagcaaagggcgacaagggcgatcccggggatgccgggcaggtcgccaccgccaccgtcgccggcgtcgtcaagcccggcgacaacctgagcgtgcgcgccgacggcacgctcgacgccgccgcggcccagtacgagctgcccgtcgcgagcgacacgaccctcggcggcgtcaaggtcagcaaggtcgactacacggacgcccgcacgttccccgtcgtcgtgtgcgacggcgagaaactcggcctgtcgttcaaactcggagacaacgccatgcccgacggcatcgagttctacggcaccgagaacacgaccatcggcctgaagaaggccacgcaggacgcgctcggcatcgtcaggggagggggcaaaggcatccatgtcgacggggacggcaccctcaaccttgacctgcccgcggcgacggcgggcgcgatcggcggcgtcaagcccgacggcaagaccatcaccgccgccgcggacggcaccatcaccgccgtcgcgcagacaggcccggtggagtacagggagctcgtcggatacgagaacgcggcgcagggatacgcggtccgcgtctccgacaggacatggctgtgctgcttcaactcgttcgccatgcagacggacggcacgacacgactgccatacttctatgcctttctccggcaggccggctcctcgagcctgaccgcgctggtggccaacccgttcgacacgaacggcatcaccctcctctccaccgacggcgaacagatgcggttctcgtacggagggggcgggcgctgggccggcgtgcgcgcggtatccggcttggacgccgccaccctcatcctcaccgaggcctgagcatggacgccatcatcatcagcgtcaccgggagccttacaaggaaggagcactcatgacattggtgcatttccacctgaccgacgccgaggggcgcggtctggatggcagcgtgagcctcgtgcccacgaggcgcgtcacggtcgccgatgctatccgtctgccggtcgcgcagaccgtcaggcttacggcgggcgaggccacggcggaggtgatgccctcgacgacccagtgggcgtggagggcgtctgagctcgtggcgggcggaatcgtgcgatacgtcgaggtgcccgacaaggagtcggcggaatactcagggctggcggacgtggatcccaagaccctggaccaatcctcggagaccgtggccgcgtgggagctcgtcacgcgtgccgcgcagggcgtgctcgaccggatcggcacgatcgacgacaaggtgcagtccgccgcggcttcggccgctgcggcgaaggcgtcggaaacggtggccagccaggaaagcgcgaaggccgccgctgcggcaggcaaggcgcaatcctcccagtccgaggcggccaaaagcgcacaggcggcgcacgagtcggagatcacggccaatggtctgatcggcgaggcgaagaccatcgccggtcagctcaccgaaaccgccggacaggtcaagcaggatgcggccacggcatcccgggcggcgcagaccgccaccgtcaaggccgatgccgccgctaccgcccgggatagagcggaaacggcggggcaggctgcggcggcggccatgcagacggctcaggccaaggcggatgcggctggagtgagcgccggcaaggcgcaggctgccgaggctgcggcagcgaagtcggccgagagcgccggacaatccaggtcggcggcatcggcatccgagagcgcggcggcacggtcggcgacggcggcatccgattcggcggcgaaggcaaaaggcagcgagaccgcggccggtgccagcgcggccaacgcggcggcggacgccgaatcagccaatacctccgccagcacggccgccggcaaagcgcaggatgcggccacatcggccgataaggccaaggccagcgagaccgccgcgaagacgtctgagacggtcagcgcggagcatgccgataccgcttcggccgccgccagcgaagccgcaaagacccttgagcaattgcgcaagtggttccccgcggccacgatgcggacggacctgtggatggagcccgtggacttcgccgtggccggcccgtatgagattcccgaccagccgaccatcaggctcaaaccggtggccgcgtacctggacgggcacacgtcggacgtggacgcgtccatggcgtcacacaccaccgcggttgccacgttggacggccagaccttgacgtgggtgagcaatgcgaccacgctctcggccgcgctcaaatcggacggctatcagccggcggaagtcaccatcaaggccggtggcaccactgtcaccaagcacgtataccttcaggccgaccagccggacggagcggtcggcgacctgtgggtgcgcaccgaaaaactccacaatggactgcggtattacaccggcgcgtacggtactgccgccgcggacgccaattcgatgttcttcctcgtggacaggccgcgcgaaatctggcggaaaaccatagacggctggacactattgaccggaaaggaattggaatgagacgaaaactcgcctattcgcaacctgtgctggcgaataccatagactatatcggcagtcttccacaaggtgactggcacgtcagcaagcaaggcggcatcctcttcgtgggcgacgacaactggacaccttacagatacctggacacgacgacgcatgaatcggaattccatttgaacaagaccacgagcatgctggtgcaggcgcaggacgggtccacctgccgtgatatcgccatcgaatcgaaacccgcatacgacattttcgtcggggggggggctcccggccttcttcgccgcaggcaccgcgccgtactgagcttgaggcgggtggtcgcgtgaggatcaggaatctctacgatccgccgacgatggatgaccgtgctccggtcactccgtgggctcctagtggtatgaccgcctcatcgaagaccaccgacgagggctgtgagataaccgccaccggcaaaggtcggtgctggttgtatccgccagaaccatttcctgatggactggcgaacgtcgtgtggcagaaaaaggacggctcgtatctcgtgggcatcgacaacatgactgtgccgatacctgagggcgtgacggtgcttacccgcgtgtgtggtttcaatgaccgttcactcgtgaccctgctgcagaatgccggattgccgcccgtgttcgccgccaccgaccacccgtattagacaaaccacagccgccctacggggcggctttttcgtaaggagatgtaatgtgctgcagaattttctagccggtttcggcggtgtgggcggcgcgtgtgccctcatcaccctcggcctcaagctctggccgggcgctttggacgctttggcgaccggcctgtacgcgcacgtgcgacccgaacgcctgccgtacgattcgccgctctcgcagcatttcgccaagacccgccgcctcggcgaacgcaccgagaaattcgacgaccgtatggacgagctatgccgggacacgatcaagaacacgatcatcagcctgatctacggcgacccgtcgcacgaccacagcgaggccgtccggtacgagctcgccaagcttgaaaaactcgacgcgcaatgctggatcgtcaacgccgccgaaaaatacttggaggaccggcagtgagcggccccgtcgcgttgggcgcgtatctcatcctcctcgcgctcatcatcgtgttccatcagggtgcgcgcaggcattgattttcacactggttttcaaagccatcccattccggtatggcttttctattgccccgtgagggggcggaagggagaacgtcatgacgatgccggccatgacgttcggcgtcacctacgcggacgcccatctgagcgtccgcctctataaaaccgactgacctaagtcccacacccgtggggcttcttttgtaaggagaaccattatggcaaacaccaccggcgtggccgaccacaaggccaccggcccggcgattcccggcctgaccgtggaacgcaccaaggcgatcatcctgctcatcgtccaattattcagcgtcgcgcagaccggcctgagcatcgccggcatcagccagctcccgttcaccaccgatcaggtgagcacggcgatcaccggcgtcatcgccgtcatcgcatccgtgtacgcgtggtggcgcaacaacaacctgaccggtgccgccgtgcagggacagcagctcaccaacgcgatcaaagccaacatcatcgccaccgacaccgacgccacgaccgggacagctcaggcggcctacgcggtgtccgactccaggggagccgacgcgaccgccgacgtggcacccatcgaggaggtgtcctatggcgacggcgagtgaagtcctgcgcatcgcggcgggcgaaatcggctattcccgttggaccgacccgcagccgggcacgaagtacgggcgctggtacgcccaatcccacggctcatactatggcgcgtcgggcgtcccgttctgcgcgatgttcgtcagctgggtcatgagccgtgccggccaagcgttcccgggactgcccgccgcctacgtgccatacgtgctcagcgcgggacgctcccgcgcggtcagcacgcgtagcgccaaacccggcgacatcgtgatattcaactgggacggcggcgtggtggaccacatcggcttcgtggaagccaaccacggctcgtacatccagaccatcgagggcaacaccaacaacgggcgcgtagcacgccgcacccgcgcatggaacaccatcgccgccatcctgcgccccgcctacagtggcagcgccacgtcgtccggcggcggcaccgcatccagcggcggcacggtccggctcacggtagacggctcctgcgggccggccaccatccgccgctggcagcaggtcatgggcaccagcgtggacggcatcatcagcggccagtacaggccggacggccggacatggggccgacccgcgctcgtggactcgtgcgtgcgctacggtggcggcggatccaacctcatccgcgccgtccaacgcaagctcagcctcaccgccgacggactcctcggccccgccaccatccgtgccctgcagaaacacctcggcgtcgcgcaggactcatggttcggacccggcaccgcccgagcactccaaagccgcctcaacaccggcagattctaaacacaagcgcccctcgactcctatgcatggagccgaggggcgcttctgcatatctgcgtcagaggcgggactcgaactcgtcgatcgtcatctcgagcgcgtccgccactcttctggccgtgccgagcgccatgagcctcgggtcgcgcacgcccctgacccactcgttgacccgctgtctggtaagtccggcggcgcgcgcgatctgcgactgccgcatcccccgttcatccagcatatccgcgaacgtcatccgttccgcctccccgccaggtatccgagcgtcccggcgcacagcgccagcacgcctgccggtatcgagtgtccggacagcccggcggcgaacgcgccgagcgccatgaccagcgagcataatcccagtctgtcgttcatgatgtcccatgcgataggatgggagccgggccttccggatagttgggatattcggaaggccctttcctcaccgcctgcgccgcctccgtggcggcctgcgcggttcgggcttccggtggagggcaatcaccaccgtggctatgggtgctatgaccgccccgagcccggcgagaaattcgcccgccgccttcagcagctccgtgacctgttgcatgttcacctcctttccttgccgactcctcaattgtaacccaaacgggttacgatgtcaagccggaggaaccccgacacaccgtatccacaccattctcggcaccctatttttgcccacattttgcccacattctcacggaaaaacagggtgaaacagggaaaaacacggataaacaaaaaagcccctcagcctgaaccgcaccccgattgttggactgaagaaattcagattcgatgatcggaggtgcggttcacaatgctgggggaggggccttttcttgcttcgggtgatatcatacggagcaaacagcagattggagtcggttctgagtgacatttgagtgacattgaaacgcggagccaaccacgagaacgcattgtggcgcgtcaggctataaccaccgtttataacgacaccttaatgcttctgatggcctcgcaatcggcgggttttggtaatctaggcgggtcatagtcgtacataacggaggattcatgcctgcacttacatccgtctcgggattcccgcgcatcggacagaatcgtgaactgaagaagatcatcgaagcctactggaagggcgccgcctcactcgacgaggtgcgcggcaccgccaaggaacttcgcgcgaagcactggaagctgcaggcacaggccggcgtcgatctcatccccagcaacgacttcagctactatgaccagatgctggacaccgcgatcctgctcaatgtcatcccgcagcgttacaagcgactcgccttcacgaaccccgaggagacgctgttcgccatgggccgcggctatcagggcgacaagggcgacgtgaccgccctgccgatgaagaagtggttcaccaccaactaccactacatcgttcctgaaatcgaggagagcaccgagatccgcctcaacggcaccaagccgttcgacgagttcaacgaggcaaaggcccggggcatcctcaccaagccggtgctgatcggcccctacaccttcctcaagctcgcccgcaacgcgcaggccgaggagctcacctacgacaagggcctggtgaacgcggtcgccgccgtctacgcggaagtgatcaagcgcttcgccgcgctcggcgcccagtggctgcagctcgacgagccgtacctcgtgctcgacaaggaggacggcgacgtctccctctttaagagcctgtacgcgaagatcctgcccgctcgcgaagacaagatcaaggtgctgctcaacacgtacttcggccacatcgccgacgtgtacgagaccgtgaatctgctgggcttcgacggcatcggcctcgacctcaacgaaggcaaggacgagaacctcgccgcggtcgagaagtacggcgtcgccgagaacaccaccctgttcgcgggcgtggtcaacggccgcaacatctggcgcaacaactacgccgtcagcctcggcctgatcgacgcgcttcgccagaagaccgacaacgtggcggtgtccaccgccagctccctgctgcacgtgccgttcagcaccgagggtgagaccgcccttgacccagccgtgctcaagcacttcgcgttcgctgtcgagaagctgaccgagctcaaggagatcgccgtcctcgccgactccgatgaggacgccaagaaggcatccgccgatctggccgccaaccaggcgctgttcgacggcacccgcgttgccgccgatccggcggtcgccgagcgcatcgccaagctcaccgacgccgacttcgtgcgccagccggcccgcgccgagcgtcagaaggagcagcgtgtcgcccttggcctgccgctgctgcccaccaccaccatcggatccttcccgcagaccaaggagattcgcgccgaacgtgccaagctgcgtaagggcgagatcaccaaggccgaatacgacgagttcatgaaggcccagatcgacgcctgcatcaggcaccaggagcagatcggcctcgatgtgctggtccacggcgagttcgagcgcaacgacatggtcgagtacttcggccagaacctcaacggcttcctgttcaccaagaacgcctgggtgcagtcctacggcacgcgctgcgtcaagcctccgatcgtgtggggcgacgtctcccgcgccaacccgatcacggtggaatggtccgcctacgcgcagtcccgcaccaaccatgtgatgaagggcatgctcaccggcccggtgaccatcctcaactggtcctggccgcgcgaggacatcacgcacgagcagcagacccagcagctggccctcgccatccgcgacgaggtgctcgacctggaggccgccggcatcaaggtcatccagatcgacgaggccgcgctgcgcgagaagctgccgctgcgcaagaccgactggcacgccaagtaccttgactgggccatcccggcgttccgtctcgtgcactccgcagtcaagccgaccacgcagatccacacgcacatgtgctactcggagttcaacgacatcatccgcgacatcgacgcgatggacgccgacgtaatctccttcgaggcgtcccgtggcgatctggtcgtgcttgacgcgatccatgacgcgcacttcgagaccgaggctggcccgggcgtctacgacatccactcgccgcgcatccccggcgagcaggagattgaggaccgcatctacgagattctcaagaagatggacatcgagaaagtgtggatcaaccccgactgcggtctgaagacccgtggtaacgccgagacctggccgagtcttgagcacatggtcgccgccgccaaggcggttcgcgccaagatcacgaagtaggaccctataggcccctgctggcggaggttgtcgccgtaggcgactgggggtggtggagcatgacccgaccacccccagtccggcatcggccggacagccccgccggcgggggcaacttcatacttgtagtaaggaacctgatatgcacacacccatgttttcgctggaggtgttccctcccaagcgggacgcccccgtcgggaccatctacgacacgcttgacgggctcgaaggcctgaaccccgacttcatctcggtcacctacgggcacggcacgcattcggatcgcaccgccaccgcgcgcatcgccaacacgatccacggggaatacggcatccccgccgtggcgcatctgaccgccctgtactcggacgaggcgaagatcgacgaggcgctcgacatgttcgaggcggcaggcgtctccgccgtgctcgccctgcgcggcgactacatcgacggcgaggagccggtcggtcgcttcaaccacgccagcgacctcgcgacctacatccacgaccgcaagcccggcctcaaggtgttcggcgcctgctatcctgaaggccactattcggccgcctcgctcgacgaggacatcgggaacctgaaaatcaaggtggacgccggcgtcacgcatctgatctcccagctgttctacgacaacgacgacttctaccgtttcctcgacaaggctcatgcggccggcatcgacgtgccgatcgaggcgggcatcatgcccgtgcgcggcgcgaagtcggtgcggcgcatggcgaaggtcaatgcctcgcgcatcccggctaagctcgaagcactgctcgaccgctggggagacgacatccagaacctgcgcgcggccggcatcatctacgcctccgaccagatcgcggacctcgtggcccacggcgtcgacggcgtgcacctgtattcgatgaatcatcccgccaccacacgccgcatatggcgcaacgtggagccgctgttcaccgtggaatgacactcccggcaaacagccgattacggcaaaatcgttggggccagacagtcatgcggctgtctggccccaaccatatgagaatgcgcggccggcaacagcacgccgcgtatctgccgtcagcgacggcgacgcttgctgcgcctgaagtcgggtttgggcgcgaaccacgcgatccgcgtggtcacggcccggcgaatcaccggaacgttggcgatagcgatgcccagagccacggcgatgagcgtcgtccacatggcgacgttcatggaggccagggcaagcacgacgacgaccgcgacgatggcgaagccgagcaccttctgcacggtcgcctgcacaggcgtcatcctctgcggctgcagcggcatggcaccggaaacaaagcccatcagcaagccgacgatagcggagacgatggttacgatcagttctgcggatgacagttgcataccgccattatgtccatccggccacgacacggccgtgtcatcgcggccgaggaagcacggtttcttgtaaaattgtaggttatgactgttccgggaacctttgacaccagcgcgcgcgaactcatccacgcaggcctgcagaatctcgacgaagcccgttcactgttccgccagctctccgccagcggattcgatgcggcacgctgcggcctgctgcttgacgcgcttcagcatgtctgtgatcccgatgtcgcgctgcgcaacctcgtcgacatcgtcaacgcgcaggtgagccagggccgcgcgctggacgacatcatgcccgacgacacggcgttccgacagctggtcgccgtgctcggcgtctccgacgcgatgggcaagctgatgcggttccgccccgacctggttcaggccgcggcgaccgaccactgcaacagtcacctctacaaccatgaccagcgccgggcgcacgtgctcgaatccgtcggagccgacccgaacgaccgcatgtccccgacagccacgatggaccttgccgacgccgccaccgccctgcgcaggacgtaccgcaaccagttggccgccatcatcgcgcaggataccatgagcgacgaccccatcgccctgcagccgcgcatcagcagtgagctgtccgacctcgccgatgcggcccttgaaggcgccctcgccatagcccggcatgagatcaccggcagcgagcactgccgtttcgccatcatcggcatgggcaagctcggcgcgcgcgaactcaactacgtgtccgacgtcgacctgatctacgtggtgaaggccgccgacgcggacaccagccagcagcagctgtaccgcatcggcacgaagatgggcacgatgttgcagcgcgtgtgccagtcggtgattatgggagtcgccgaaccggcactgtggcagattgacgggggactgcggccggaaggcaaggacggctccctcgtgcgcacactggaatcacatcaggcatactacgagaaatgggcgcagaactgggagttccaggcgctccttaaggcgcgcccggtcgcgggggacccgcagatcggcgacgcatacatgagcatgaccaggcctatggtgtggagcgcgtcgaagcgcaagaacttcgtctacgactgtcagcagatgcgcaagcgcgtcgaggacctcatcgcgcccgcgctcaaggaccgcgagatcaaacttggccgcggcggcctgcgcgatgtggaattcaccgtgcagatgctgcagctcgtgcatggccgcaccgatgagacgctgcgcgccagtgccacgctggaatcgctgcgcaggctgtccgagggcggctacgtgtcgcgcaagcaggccgcgaaactcgcccgggattacagcttcgaacgggtgatggagcatcgtcagcagatgtgggcgctcaaacgcacgcacctgttccccgacctcggcgacggcagcgtcggcggacttgagaagaagcgcgacgtcaacgtcgaaaagctcagccagaaccccgagctgcgcaggctcgcccgcgcgtttggcctgcacgccgaggagctggtcgcgaaatacgacgagacgcggcgcgaggtgcgccggctgcacatggacatctactaccgcccgatgctgccgatcgcggcgttgaacggcgaggatttctcgctcgccccgcaggtggcctacgaacggttcgcatccatcggattcgccgatccggaggccgccatgcggcatgtggccgtgctcaccgcaggcgtgtcccgagcctccaagatcaaccgcatactgttgccggctgttctgcaatggctggggcaggggcagaaccccgacatggggttgctgaactggcgcaagcttgaggagcgtttcggcacggacagcgagtacctgggcttcctgcgcgactccaattcggccgcgcaacggctgtgccacgtcctgtcgaactcccgtttcctcggcgacgcgctgaacaagtccgtggagtcggtcacctggcttggcgacgatgacgcgctgatcgcacgctcgcgcgagagcctggacgtgcaatgccggtcctctctgagccgcaacgccgacggcatcaacgatttcgcgacatcgatgcgagccatgaggcgccacgagatcgagcgcatcggtctggcccggctcagcggcgtgatggacgagacggcgtgcctgaccggcatgaccgacgtgtacgacgccatcatcgatgcggccttgacatgggcgatccgctatcagacatcggcgatggggctcggcgagccgcctgccgcgatcgcggcgatcggcatgggacgctacggcggccaggaggtcaatttcagctccgacgccgacatgatcctgctgtataggcccgcggacggcgccgacgagcaggtcgccaaccagttcgcccgcaaggtggtcgacgcgctgcggcaggtgctgcaggggccgaccacgcttgagccgaagatcgagatcgacctggaccttcgccccgaaggcaagaacggcccgctgattcgctcgtacgcctcctgccgggagtactactcgtcatgggcgaacacgtgggaacatcaggcgctgctgcgcgcccggttcgtcgccggggaccgggcgctcggcgaggatttcctccacgacatcgcggacccgctgcgatacccgataagcccgctcaccgatgcacagctcggcgagatccgcaagctcaaggcgcgcatggaagccgaacgcctgccgcgcggcgtgaggcgcgacaggcatctcaaactcggcaagggcggcctgtcggacgtcgaatggaccgtgcagcttctgcaactgcagcatgccggcgacaacgcctcgctgcggctgaattcgacactcgcgacgctggacgagctggaacgccgcaggttcatcgaccgcggggacgcggcggtgctgcgcaaggcgtggcgcatgtgcacggcggcccgcaacggcaactacctgtggaacggacgcgtctcgcaggccgacatcctgcccgacgacatgtattcgctgggcggcatcgccgtgtatctgggatacgatgcccaccgcgggcagcatttcgaaaacgacctgatgggaacgatgcgcaaggcccgcgacgtggcagagcatctgttttatggacgctgatatgagacggtcgtgtgtgtcgcctgtgaaaaatcagaaatctgcattatagtcggataggtcacttcagtggccaccttatccgcttcacgcatgaaaggtgagctgtgtcagtcacagaggagccggcggagacgccgttggtcggtcaaagcgtcatcacgctggatacgctttccatttcccagattcgagatttgctgcacaaggcggcatacatcgatgcgaaccgcaaacgcgtggcgcatacctgcgacggcagggtgttggccacgcttttttatgagcccagcacgcgcactcgcctgagcttcgagaccgccatgctgcgtctcggcggccaggtcatcgggttcgccggcgcgcagctcgcctcggtgtccaagggcgagtccatcgccgacacgctcaagaccgtgtccaactacgtggacgtggtcgccatccgccatccgaaggagggagcggcgctggtcgcctcgcgcgccgcgtccgtgcccgtgatcaacgcgggcgacggcggccacatgcaccccacgcagacgctcgccgacttggcgacgctgcaatcgcgcttcggtcgtgtcaccgacctgaccatcggcctgtgcggcgatctgacgttcggccgcaccgtgcattcgctgatcgagacgctgtgccgcttcggcaacgtgcgtttcgtgctgatcagccccgacgagctcaagaccccgcgctatgtgatcgaccgcatcaaggcgacgccgtcctgctcctacgtggaggtcaaggacctcgtctccgtgatcggcgacctcgacgtgctgtacatgacccgcgtgcagcaggagcgcttcttcaacgaggatgactacctgcgtctgcgcgacacgtacatcctcgacgaggacaagctctccaaggccaagccgagcatggccgtgctgcacccgctgccgcgcatcaacgagatcgccgtcgaggtcgacgctgacccgcgcgccgcctacttcgagcaggtcaagaacggcatgctcatgcgtatggcattggaaagctcggtggtcggagaccagctgccgggatatgagccgctcgaccccaaggaggttcaggcctgatggaagtcaccagcattcaaaacggcatcatcatcgaccatgtgcccgccggcaccgcgctcaaggtgctggagtacctgaagatcgatccgtccaagacgcggctggcgctcatcatgaacgccgacagccacctgtacggcacgaaggacatcatcaagatcgaggatgaggaaaacgtcgatctcgacgtgctcggcctggtcgcccgtcaggccaccgtcggcatcgtgcgcggcggcaagatcgtccgcaagctcaagcccacgctgccggaacacgtggtgaacatcatcacctgcgtgaatccccgttgcgtgaccaccaccgagcgtggcatcgaccagatgttccatctcgtgcattcgcagcgtcaggagtaccgctgcgactactgcgacgaggaagccaagttctgacctcacgcccgtcgtttcgcggtttcggacgtcaagccctggcgaccgaaaccgcggtccagcgggtgcaaccgtcttcatcagagccaaccccacaaggagatgcatatgctgaccttacgcaacattcgcgtctgggacaccggcgagatcatcgacatggtgattccctcggccgacgcacgcaatcagccggaggacggcggcgtcatcgaaggtgacttcgacgccaccgggctgacggtcgcccccggcttcgccgatccgcacgtgcatttccgcgatcccggccagacctataaggaatccatggtgtccggctgcagggcggctgcgtcgggcggctacacgaacgtactcatcatgccgaacactgtccccgccatggacgggcgtgcggtgaaggccggcgcatccggtgccgcggaggtgctggacgcaggctgcagcgacgtcatcgactacctgcagcattacgagcgggtgcacgacgtgtcgctgccggtgcgctacgacctgtgcgtatgcgcctccaaggaccgcgccggcgtcgaggcgagcgacccggccgactggctgcgccatctcgacggccatgacatggatggcaaggacgcgtggcaactggcccacccggtcaccgccatcagcgacgacggggccgcggtgacgcccggcctcctcgaccaggtgctcgccaacgtcaaggagagcggcctgtatctcatcgagcattgcgagcatcacgacaccggtgcggtcaacgacggcccggtctcccgcaagctcggcgtgccgggaatcccggaggacaccgaactgaagatcgtcgcgcgcgacatcgagaaggcgcgcgagaccggcgtgcacatccacttccagcatgtcagtacggccatctccttcgacgcgatccgcaaggccaaggcggaagggctgccaatcacctgtgagaccgcgccgcactatctggcgctgtgcgacgaggacctgctcgaatacggcacgctggcgaagatgaacccgcctctgcgatcggccgcggatcgtcaggcaacgattgccgcgatcgcggatggcacggtcgacctgctggccaccgatcatgcgccccacacgctggaggagaaggaacgcggcttcctggaggcgcccaatggcatcatcgggctggaatgcgcgtacggcgtgtgccacaaggtgctggtcgacgggggttacatctccgaccagcggctcatcgagctgatgagcgtcgcgccctcgcgcctgatgggccaccggccgaccgacgtcgccgcgctgctcaacgtcaccgccccctgcgcgtccaagcgcactctggacctgtccgccgtggagcacccggagaacgtcgacctcgccatcctcaacacgtccgaggcatggaccgtcgaccccgagaagttcctgtccaaggcccgcaacacgcccttcggcggatggcatgtcaccgggcgtccgctggcgaccgtcatcggctccacgctggtattcagccgcattcactgacggcagattcgaaccggcccgcaaacccgccgtcagcggcgggacagacacatgaaaggaagcaccacgcatggatcgtttgatcgaagccatcgaggaggcacagaaccccagcgtcgtcggactcgatccgacgcctgcgctggtcccgccgcaggtcgtggattcgttcaccgacgaggtgcgggaatccatcgaggatgagtccgaattgcccgcggcacgtctggccgtagcgtatttcgaattcaaccgggcgatcatcgatgcggtcgccgacatcgtgcccgcggtcaagccgcagatcgccatgtatgaggcgatcggcccggccggggtcgacacatacacgatgacctgcgaatacgcccagcagcagggcctgtacgtgctcggcgacatcaagcgcggcgacatcggatccacggccgccgcatacgccggtcatctgtccggagtcaccgacggcgacggactgtatgacccctggcacgaggatgccgtcaccgtcaacccttatctcggcacggatggcatcacgccgttcgtcgaggcagccacggcgcacgacaaggacatcttcgttcttgtacggacgtccaacccttccagctccgaattgcaggagctggagcttgccggcggcgagaagctgtacgagcgtacagcggacctggtggagggctggggcgccgacaccatcggacgccacgggtattcgcacgtcggcgcggtcgtcggcgcgacccatccgcaggagggcaaagcgcttagagcccggatgccccacactttcttcctcgtgccggggtacggcgcgcagggaggcaaggcgggcgacgtcgccgggatgttcgacgccgacggctccggtgccatcgtgaactcctcgcgcggcatcatcggcgcatggcgcaagagcgaggaataccgcgaggacatgagcgccgacgacgcgctcgacctggtggcgcgctgcgcccgcaaggccgcgcaggacatgcgcgacgacctgcgcgtcaacgtgtaccgctgaggcggtgagccgcatgcggtgattcggcttcgggagacgccgccgaatcaccgcatttcgttgcgccacgagcgcgtcacggcatcgtcatgccgtaatcttgaactgatggtcacatggatggaggagtgtatgccagcagccaccttcacgccggtcgatgatgtcgtaagccaagcgacttccgccggtttcttccccggacgacatgccgtcgacgtcaccgatgtgcgcaggctgtcggacggcgtattccgcctgacgttccgcgacggatacatcgccgcccacgccaaggcggcgcagttcgtcaacctgttcagccatgacagcatgatgctgatgccgcgtccgttcggggtgagtgaggtgcgcgacgatctggtcagcgtcatcttcgccgtcgtcggcaaggggacgcaggagttctcgcgtcttcatgccggggaccggatcgacgtgctcggcccgctcggccgcccgttcaacacgaaacgcgacgcacactatctgctggttggcggaggcctgggcgtgccgccgctgatctatgccgcgcaacggttgcaggcgtcggaaaagtcacactcgaccgcggtgttcggctacaggaacgtgcatttcgccgatgagatcgtgagcccttacgcacaccgcacgctgagcatcgacgagtcggaaggcaacgtcatcacgttgcttgaccgcatggaatcacaaggggaactggcggccggcggcctggagccggtcgtgctgtcgtgcggcccgctgccgatgatgaaggcggtggccctgtggacgaccgcgcggggcatcgaatgccagctcagcatggagcagcgcatgggatgcggatacggcacatgcgtgacctgcgtggtcgatacggtcgccgggcgcagcaaggtgtgctctgacggaccggtgttcaccgcccagcagctcggatgggaggcgtgaccatggatgccatcaccgacacgaacgtatatgagccgcaccagtggaagcattcgaccatcgtcgccggcgtcgaatggaagaaccccgtcggcaccgcgtctgggacgttccagctcgcggcatgccgttggttctatgacgtgagccagatgggcgccatctgcaccaagggcgtgtccccagagccatggcagggcaatcccggcccgcgcacggcggagacccccgccggcatggtgaactctgtggggttgcagaatcccggcgtggatcattatctggtggacgagctgcccaagctcaaggacctcggagccacggtcatcaccaatgtcgccgggcacagcgacgacgagtacgccgaagtcgtggcgaaactggccgactcgcgcgccgacatgctggagatcaacgtcagctgccccaacgtcaatcacggcggcatgagcgtcggaaccgacccggaggcgctgcaccgcctgatcgaccgcctgcgcaagatcacctcaaagccgatgatcgtgaaactgtcgcccaacgtcaccgacatcacgacgatcgcacgggccgcggtggatgccggcgccgacgcgctgagcctcatcaacacgctggtcggcatgcgcatcgacatccgcaccggcgaaccgatcctctcgaaccgcacgggcggcgtgtccggcccggcgatcttcccgatcgcgctgagctacgtgtggcgcgtgcgtcaggcgctgcccgacattccgatcatcggcatcggcggcatcgactcgggggagaaggcactggaatacctgtatgcgggcgcgaacgccgtcgaggtcggcgcggctgccctgtacgatccgacggcaccactgcgcgtggcccgcgagctcgacgacctgttggattcaaggcccgaacttgcggcgaagctcgcagcgggggagacttggagataaccatcaattgaggagggtattgtgaccatcgcgactcttgaccatcgcttcaccgaattcctgctggaatcgaacgcgctgaagttcggcgacttcaccctgaaatcagggcgtcaatcgccgtatttcatcaacgccggcgcgttcaatgacggtcgcaagatcgccacgctgggtgcgttctacgccgagaagatcgccgaggagatcaaggccgggcatcttccgcacgacatcgacacggtgttcggcccggcttataagggcattccgctggccgtatccaccgcgatcgcgctgacctccggccacggcatgcaggtcggctacacgttcgaccgcaaggagaaaaaggaccacggcgacggtggcatgatggtcggcacgcagctggccgacggcatgaaggtgctgctcgtcgacgacgtgatgaccgcaggaaccgcggtgcgcgaggtcatccccaagctcaaggccgaggccgacgtcgacatcgtcggtctggtgttgagtgtcgaccgtatggagaagacgaaggactccgacctgtccgcggtggccgcggtcgagaaggaattcggattccccgtgctcgccatcgccaatgtgcgcgagatcttcgaggccgggcgcaacatcgtcacgtccgacggccagccgtacgtgaccgacgccatcaagagcgcggccgacgactatctcgaacgctacggcgcctgattcgtatccggcgctgacgggctgcggcattgcatttgccgtagcccgttttcttatgggcgtgtcgccgttttacttcaagtacttgaggtttttagagttgacgatatgagcacaacggccacatggcatacgattcgcgaggcgtcgatgatttccgggcttccggagtccacgctgcgctactacgagcagatcggcattatcgctcccatcactcgcgacccgagttcggggcatcgcgcctattcggacgccgatctcgaacggctgaccacagtatcctgtctcgcagccacgggcatgccgctcgaatcgatgcgcacatacctcgccaactcgcagggcgggcgagaaggtgcacgccgccagctggaactgctcgacgcgcaggccctgcgtctcgctgccaaagccgaatccattcgaatgcagcaggcgtacgtatcgttcaagacactgtactggcgggctaaggctgaggggcgcgacgaggaggcgcagcagctcatcgaagaaaaccggaacatcatcgaacaggtgaagcgcctgcaaaccgacgtcaaacaataaacgacaatagacagatattcccaacaaaggagtgattgacatgaccgaaatgatgaaagccgcgattttcgtggagcctggcaagatggccgtggaagaagtgccgaaggcgacgcttgaacaggatgatgacatcgtgatccgcgtggtgcgcacgtgcgtgtgtggctctgatttgtggttcttccgtgggctgagcggacaggccgcacacagccaggtgggtcacgagtccatcggtgtggtcgaagaggttggcgcggcggtcgaatccgtcaagcccggcgatttcgtggttgtgccattcccgtacagctgcggtaaatgcccggtgtgcaaggctggcttcgaatccgtatgccctcacggcggctacttctccgcctgtcaggccgaatacctgcgcgtaccggaggcggacggcaccgtggtcaaggtgcccggttcgccggaagactacgatgacgcgacgcttgcttcgctgctgaccgtttccgatgtgatgtccaccggttatcacgcggcggtttctgccgaggtcaagcccggtgacaccgccgtggtcatgggcgatggcgcagttggcctgtgcggtgtgattgccgccaagatgcgcggtgccacgcgcattattgccatgagccgtcacgaggatcgcgcggcgctcgcccgcgaattcggtgcgactgatatcgtgcccgagcgtggccaagaggctattgacaaggtgctggagatgaccggtggctatggtgcggacgcagttctcgaatgcgtgggctccaagcagtccttcgacacggcgattggcctgattcgccgcggtggcgtgattggtcgtgtgggcctgccgcacgacgtggagatcagcgccgaaggcacgttctacggcaacatcggcatcaagggcggcccggctcccgtgcgccactatgacctcgatgacggtctgctggatgcggtgctcaagggcgaaatcaaccccggtcgcgtgttcaccgccgagtacgacctcgaccatatccaggacgcctacgaggcgatggaccagcgcaaggtcatcaaggcgctgattcgcctctaggcgaggcggttgtatcagcgaatcgttctcaataagaaacgtgcgaggattcctcacaaaacagcacaatcgaacatcaaggggatgcccggaattgcaacgttcctggcatccccttgttcgttttggcctcagcgccggctcgcacttttcttattgagaaccgttctctgaaaacccggcgcgcgtctactgcgccgtcgaggcgcccaccgaagcgagtcgctgattcacgcgggtctgaacctcgatatagtactgctgctcttcgggggtcagcgaattctcgtcgatggcgtcgagcttcttcatggcatcgttgtacttgaccattatcttcgcgtagtcggccgccatgctcgccgggtgcccgccggcgttgtacttctccatgaagtcggcgtactcgttcatcagcgactcgtagctgtccatcgcggccttgaaatcggcgtcggagctggatccggtggaagcgtcgccggaacccgaatcaccgttgttttgcgtagcgccgttcccggatgtgccggaagtcgaggagtcgtccggggcgaagacgtaaatggccatgatggagtcgcccttggaatcgtatctgatattgaccgagtagccggcggcgttcttcgcgttgaacacggaggagctcttgaagtagtcgacggtgaatcccttctcctgcagagccttgacatagttgtcgtacgctgtggcatcggtgccgcacaccttgatgtagaacgtgctcgagctatccttctcgatcttacccttggaggattccggcttgggcagctgactggccaggtcggtcgtcggccatgagtaggcatcgcatttggccttcgcggcttccttcgcggcctgttccgcggcgtcatgagaggccttggcctcgaggccgttgcgtacgacatccacgccgccgacgatcagcgccaccacggtgataccgaccgcgacccaggcgagcacgcgcccctgcgccttgccgtccttgcgggttgtgtagacggagaatccggacaacaataccggcaacagcgcgaagaatgccaacagaccccagctgttcacaccgatgaaggtgatcagcaggaacaccgcggcgacgatgatcgcgaacaccgccagcttggaggtcttcttgttgcggacattgggtgcgtcgggtgtattgggagtgttaggagtgccgggggcgatggggatgatgcccggcgtctgcggcggcacggtgttccccgcgggctggaccggcatgggctgagtgggctggacgggttgcggccccgatccttggggtggctgtggcgtgaaatcggatgggttcgtcatggtctgctctttctcttcaatcgcgcgtttatgcgcggacactggtgacatcgtccattgtcatgggcgatgcggcggcccgtcatcagttgccaactgaatttcggaaattttttccgcatggatgattccggcaccggagccgtgtcgcacgccgccgcgccatgtagtctggtcacagtgaaacgaacgggccagtcgattgacgctcccgacgggagatctcccggcggtccggtatgtgaagacataccaagggaaggcgaggcatgaacgtcaacgatccggcgcatctgaccgaggaaccgcatgaacgagccgacgctactcgacgcggactgaccgcggcgctcgggggacgacgacgattatggacgaacggcagaccatgcacgccatgatgctcgacgacgcctactgcgtcgaacgggtgctggcggacggcgcatacggcgtcaccgaaatggtgagcctcgatggagccgggccgttcgtgcgcaagaagatgccgctgcggctggcgaggcggcgactgtggtccccacactcgccgaatgcgcttcgtcgcggctgccgcgcgtcgaggcgacctacgagctgcccgacatgttcgtggtcgtttacgactacgtggacggcgtgacgctcgaccattacgtcggcgagcgcgacgatgacaacggtgatggcgtctacggctcggatgtcgccatttcgctcatcctgcgcgacgagaaggggaacttcgtgttctggcgtagtgagtatgtgcgtaaaccggccaaaggcgaatcccgcgcgttctccatccagatctatggtctgcccaagtacgcctcctatgaggcgtacgcctatgcctcgtagatgtttctcctttggaagaggtacatttgtcttgttgcggagagctatctgcgttcaatgaggtgcctgaaacatgagaacccgagtatcaacgttgcaatgacggcgtttgtactcgagggttccccattcggtacctctctgaagacagttagcattctgcaggaggtcgaatgtacctcttgcaacgaagatagatgcttgcaacggtccgaatatgtcccttgtcggccagttggcgtccctgcaatgggtgatgacgtgacgcgtcgtaggagacttgagtgaaggggtgcccgatatgcagcggatacgggacgatgcgcgcccggagtcgatcgaggtgcgcggcgcgcgcgtgcataacctcaagaacgtcgacgtcgacgtgcctctgggcgaactggtcggtgtggccggcgtctccggttcgggcaagagctcgctcgcactcggcgtgctgtatgccgaaggctcacgtcgctatttggaggcgctgtccacgtacacgcgccgccgcctcactcaagcgagccgcgcgcaggtggacgaagtactgcacgtgcccgccgcgctggccctgcaccagcggcccgcggtgcccggcatacgctccaccttcggcacgatgaccgaattgctcaacagcctgcgtctgttgttctcacgtctcgcctcacatgtgtgcccgcattgcggcgcacgcaacgaaccgactctcaacgtggccgccggcctgcccatcgtctgcgcgaattgcggcaaggattttcacgcgcccggcgctgaatccttggccttcaactcggccggcgcatgcccggcctgcgccggcaccggcatcgtgcgcgaggtgaaccgcgcggcgctcgtacccgacgaatcgaaaagcatcgacgagggcgcggtgctgccatggggttcgttgatgtgggacctgatgaaacaggtcgccggcgcgatgggcgtgcgcaccgacgtgccgttcaaggacctcacccccaaagaacgcgacatcgtcttcaatggcccggccgtcaagaagcacatcctgtacaagccgaagaaaggcgacgacttcgccgaactcgacttcacgtatttcaacgccgtgtacaccgtcgagaacgcgctcgccaaagccaaggacgagaaggggctgaaacgcgtggcgcggttcctcgaggagaaaacctgcccggattgcggcggcacgaggctcagcgaggcggcgcgcgccccacgggtgcgcggactgaatctcgccgaggcgagcgcgatgaccttggacgcggcggtggactgggtgcgtggcgtgcccgggtcgctcggggccgacatgcgcccgatggcgacgaacatctgcgaatccttcctcgatgtggcccgccggttgttggagcttggactcggctacctcgcgctcgatcgcgccggagcgaccctgtcgaccggcgaacgccagcgcgtgcaattggcccgcgccgtgcgcaaccgcaccaccggcgtgctctacgtgctcgacgaaccgtccatcggcctgcacccggcgaatgtggacggtctgctcggcgtgatgcgtgacctcgtggcggatggcaactccgtggtggtcgtcgaccatgatgtgcgtgtgctcaaggcatgcgatcatctcattgaaatgggtccggtcgccggtgccgaaggcgggcatgtgatcgcgcagggcacggtcggcgacgtggcggcgaatccgcgcagccgcatcgcgccgttcctggccgatggcgaaagtgtccgtgaacgcgggtgcatgcccgtctcgcatatgttcgaccttgggcatattcgcatgacaaccagtcagctgcatacggtcaagccgctggatgttgatattccgcgcggccgtctggtggcggtgaccggcgtatccggctccggcaaaaccacgatggtgctcgaatcgttgattcccgcgctcaaggcacggtctgcgggggagaagccgtccgagcatgtgcgcttgatcgacgccgacggcatcgagcgtgcgaacctcatcgacgccacgccgatcggcgcgaacgtgcgttccaccgtggccacctacgccgacatccacgacgacctgcgccgcgccttcgcccgaagcgacgaagccaaggcgggcggttggaaggccggcgacttctcctacaacaccggcagactgcgctgccctacatgcgacggcaccggttcgatttcgctcgacgtgcagttcctgcccgacgtcgacatcgaatgccccgactgccggggctcccggtatgcacccgaagccgacgcgattcaccgcacgaccaaggacgggcgcgaactcactctgccgcagctgatggcgatgagcgtggatcaggcgttggccgtgaccgtcgacatgcgcaaggtgcatgcgcaactgaccacgctgcacgatctgggtctgggctacctgacgctcggcgagccgacgccggcgctttcgggcggtgaggcgcaacgcctgaagcttgccagcgaaatgggcagggctcagtcgcacgccgtgttcgtgttcgacgagccgaccatcggcctgcatccgctcgatgtgcgggtgctgctcggcgtgttcgaccgactcgtggcgtccggcgcgaccgtcgtggtcatcgaacatgacctcgacgtgatcgccaacgccgattgggtgatcgacatggggccgggcggcggcgaaagcggcggacgcatcgtcgccgccggcacgccggagcagatcgcggccgatgcgaacagcatcacgggccggtacctgaggtgactgtatccgtgggcgacccacatggcggtcatgcacggctgcgagggatgccgcgcgagtaggatgaccgtccgtggttcaggttcatggcatcagacgcgcgagcgcggacgcgaaataccggcagatgaccggtcagccggtcaaaccgttgattctcagactgtgtctgccggcggtgatctccaatctggtgaccaccgcctacaatttgaccgacacttttttcatagggcagctgggcaccgcgcaatccggcgcgatcggcatcgcgttctccatcatgaccgtgatgcaggcgctcggcttcttcttcggcaacggcgcgggcaactcgatgagccgcgaactcggcaaacagaacaacgagcgggcatcccggctgctggccgtaggcttcgcgggcgcggtgatctcaggtctgacgatcgccgcgatcgggctgctgacattgcggccgctggtcgtcatgctgggttcgactcccacgattgcgccgtacgcggtgcaatacctgacaccattgctggtcgccgcgccctgcgtatgcgggtcgttcgcgctcaacgggctgctgcgctaccaaggccagtcggcgttcggcatgatcggcttggtttcgggcgcgctgctgaacttcttgctcgcgccgctgctcatcttcgtggcgggcctcgggatattcggcgccgggctggccaccgccatctgccagacggtgagcttcgcgattctgacgacgatgagcgccagattcggcgtgatgaaactgtcgttgcgcaactgccggtcggatgtgctgctcatgcgcgaggtggccggcggcggcctgccctcgctgattcggcagggtgcgggctcgatctccgtgacctgcgtgaacatcgccgccaacccgttcggcgacgcggccatcgccggcatggccatcgtgatgcgcatcatgttgggcgccaactcggtgatcgtgggcctcggccagggcttccagccggtgtgcggatacaactacggcgccggcctgtacgcgcgcgtcaaggaagggtactggttctgcgtgcggctcgccaccggcgtgcttgtggcgttggccgcgctgctgtggatgtccgccccgcatctggtcgagatcttccgctccgacccggccgtggtggcggtgggcgtgtccgcattgcacattcaatgctgcacggtggtgttcaatggcttcaacatgatgggcaatatgatgacccagaccatgggacgcaccggcatcgcctcgttcctggcattgtgccggcagggtctgtttctggcgccgatcgtactggtgctgccgttggcgttcggcgtgctcggcgtggaaatggcacagtcggtgtccgacgtgctcaccttcgcggtcaccattccattcatgcgccgcatcctacgcgaattgagctgattcgccgccccatgcgcaagcgatggcgacgacgggtcggacggattcgataaaatgcactgtgcatacgttttcaacagcgtttcgtcgcggcatcgggcagtgatcgccggacggcgacgaaccgacgaaggcagggaggcatacgaatcatggaacagacgaacggcaaacgcatcgccatcgtgacgggcagcgccctcggactgggctatgaactcacgcgacagctcatcgatcgcggatggttcgtcgccggcatcgacttcaacgccgaacgccagaccgaactggccggcgaattcccccggggctcttaccacgggttcgtcggcgacgtgtccgacgaggacttcgtcaaagcctcggtggccgagatcgccaagatcgggcacatcgacctgctgatcaacaatgccgggcagccctcgttcaagacgccgaccgcctacgaggccgccgacgtggacaaatgcctcaaaggcctcaagggcatgattctgtggtgcgtccagacgctcaaggcatgcgacgaacagaacctcaaaatcgccaacgtgatgagcaccgccgctacgcgcggcaacgccaacgaatccgtgtactgcgccaccaaatggggtgagaaggggtatacacagagcctcaaggccgcgtacaaggggtcgagcgtcaccgtcgtgggcgtgtaccccggcggcatcgacaccgacttctaccgcgagagccacgactacgtctcactcgacaagcagcacacgttcatgcccgccgccgatctcgccggcgtggtgctcgacaacctgctcagcgaggcgcgcctcaccgtctccgacattctcatcgagcgcctgtaccgttgaccatggcatcggcgcgcggcaatggcaggcaatcccggcgcaggcccgcagccggcgacatcgagtcgctgtaccgcgcgctgtccgcggaactgagcccgaccggatggtggccggcggacaccacattcgagatcatggtgggcgcggtgctcacgcagaacaccgcgtggggcaatgtggatcgttcgctcgcggcgttgaaggcggagagcatgctcgacccccatgcgttgacggtcgtggaaccggagcgtttgcaggagctgattcggccgtcgggcttctacgtcaacaaatccaagaccctgcgctcgttgagccgttggtatgtggagcgttgcgacgcctctcccgaaggagccgacggcgtcaccgacgccgagctgcgcgccgaactgctcggattgttcggcatcggcggcgaaacggccgacgatatgatgctctacgtgttctcccgccgcacgttcgtggccgacacctacgcacggcgcctgttcgcgttcctcggcttcgatgcgccggccggatacccggcgttccataaggcatatgcccccgtggtgctggacaccgggctggacgtcgccgaccttcaggaattccatgggctcatcgacgagttcggcaaagcctaccgcgacgatgcggcaaaaaacgagtcgtttctccagtcgtggcgaccgggagaggctgctcctcgcccgacggagtgacgagacggtgccacgggtatgttcaaacgagttatgatggacaatcatgagcttgattgagatgatgattctggggttcctttcggagcgttccatgtgcggttacgagttgcgcaagaagatggagcagctgcaggggtatgcgcgcaaattcagcgacggcgcgatttatccggcgaccaataggctcgtcgaagcgggattgatctccgaacaggcgtcgattcgcgacgggcgccagcgtcgcgtgttcaccctgctggacgcggggcgcgccaagttgatcgacgagcttaaaagcaccagtggtttcaatctcaccgatttcacccggtggaccgtcgtgcttaccttcctgtccgtcgtgccagacaaaaccgaccgtgacgcggtgttgcgccgccgttacgatttgctcaacggccacgacgtgcatctcttctactgtgacgcgggcaatccgttgagcgccgagcagatcgacgacccgtaccgcaagggtatcatcaccgtgcatgacgcgcagatcgccgccgaactcaaatggctgcgttcgatgctggagatgtaaggggcaatgggtcaattcgctattatggttggccagttggtcggcttcttcatcatgctgatggtcggatacggatgcgtgaggcttcgcttctacggccagaccgcgctcgacggcatgtgctcgctgctgctcaacgtgcttatcccgttgctggtgttctcgaacgccatggcgggtgcggaccgcgcgcaggtcgaggccaattggggcgtcatgctgctgaccgcggtgatgtacgccctgcttatcctcgtgttccgcttggtcgcgtgggtgttgcggcttgagggatcgcgtagccacgtgttccaggcggcactgatcttcggcaacgccgggttcatcggcattccgatcatcatggcgttatggccgcacgagggtgcgatctacgtcgcgttgatgtcgatcgtcgatcagacgctgctatggacgtacggcgtatggctgtgcgagccggttcccgaacccggtaccgtcgcatcacccgacgccgccggccggcccacgctcggcctgcgcgtgcgcaatctgctggggaggttcgtcaaccccgcgttcatcggggtgatgctcgccttggtgctgatcatgctcggcgtgaggattccctcgatcgtcctgactccgctgcgcaccatcggaggcatggccacgccgatgtcgttgatctacctgggcggcctgttcgcgctgaccaaatggtggggcgtgctgaaacgctacgaactgtacgtggggctggtcgccaagatgatcgccttcccgctgggcctgtacgcgctactcaccgcggccgccggagcgctgccggagctgccgatcacccacgacatgatcatgatgatcacgttggtggccggcctgccgaccatgaccaccatcgccatgttcaccgcccgcaggaacaacatgcccgactacgcggtcggcttcgtgctcgtaagcacgctgttctcgctgctttcgctgaccatcgtgtcggcggtggtgttctgacgagcgcgagcgacagtccttcgattcaacgcaacgcgtcgtattcggcctcgaccggctccagccactcgttcgaggcgccgtccaccgcgttcatgatggcgatatgcgcgaagtcggaatccggcgcggccccatgccagtgcttggtctccggcgccacgtacaccacgtcgccggggttgagctcaactggctccttgccccactcttggtagtagccgcgcccgcccacggcgatgagaatctgacaggccttgtgatggatatgccagttgttgcggcagcccgcctcgaatgtgacgttggaaacgttgacttccttgcccgagatcagcggtgccagatagctctgcccaatgaaatacttggcgtatgcggcttcccgatgcacggccgcatccgcaccacgcccgccgcgacgccctgctcgacgaacgtttccgctgaaacgacttccggtgaggtcgggttcgctcgaaggtgttcggtccaccttcagttgcgtacggtaaaaccggcatccgcgatgcgttcgcgcatgttccgcgcaatcgatatgcatcgggttcgcgggatgccggctttcatgccgatgtctgccatgtcctcaacggtgatgccgcgccccttaccattgaccgcggtggtgtgttcgccgttgataccgggattctcggtaaggtcgtacgcgggggagaggctccaagcgccggactccgcatcatgcaggtaggagaagttcttcgcgtggtcgtcgcgattgccgatgaacacattgaaacacatgagtcgatacaatcgttcgcattccttgatgccgccggtcatgcgcatggtcaatcgcatcagcaaggcgtagtccagattggcgatgcggtgtgaagtctccaacaggccgccggcggaaaccatgtgcaccttgccgatttcgccgttcgtgagcggtatgcggtcaaagcgcttgacgccaaaatagcctgcgcatcgacgtgaagggaacaacctggtttccggcatgtcgattccgcaagtgcgtgcaagattcgatatgtggtattccatctcgccgatatcgggtgcatccacggatgaggggaacttgatgagccattcctcgccattgattgtggtgaggattttcgggcgggctccgcctgacgaaccgccaagaacaaacagctggtcgaggtcattcgagaagtcggtgctcaacacattcaggcattcctcggcgagtgagtcgagatcggggaatgattgcaggtcatcgtcgattgttgaagcgggttcgtattccagtgcgcccatgccgccatgacctacgatcgatagacgcgccagcgggccgaccgaatacgggtcgatgccatgttgacgcagcattcggtcggtcagcagtcgtccccatccgtcgggcatgctgtcgtcgaacacgccgaacatgccgttcagcggatctctttgggcgacgaacacgccatctctgagcggaaggcttatcgggctgatggaaaaaccgtgcgtcagccaggtcttgtcgtaggcgaacgccagtgtgcgggaaggtgacatggtaagcattccgacggtattgcctgcgagcagcacgcgcacgcggtctacatccagtagcggggtcatccgatgtcctttccgtggcgcgtcgctgtgaccacgtcatcgatcgagcggtaatacggctgggagaacagtgcgtcgaaatcccgttcgcagtccaaggcgaaggcgatgccaaccagtgcgttcagtgatatctcatggagttgttcgaatcgacgaatcgacccaagactcacccctgattttcgggcgagatcggactgcgtcatgccgtgttccttgcgtctcatggtcattcgccgggcgataccggccattacttctccgggaagcggctcatctaacaaatcatacatactaatattttagcaatacttatgaaattatatagtaattactactatattggtagcattcttcatgtcgtgtcagtcctatccggcgcttgtaagtggcttttgccggaggacgacggcggcgtcaagcgcatgctggatatcggctgcgggccgggcaacagcacggccgtgctgcgcgaacgctacccgcacgccgagattctcggcgtcgacagctcgccggacatgatcgaggcggctcgcaaggcctaacccggacatcgatttccagctgtgcgacgtgtcgacgcatcggtgaagttcgtgacgttcatcgacgcgatgctctcgctcgtggtcgcgcaggacgttctgctggaggccgagggcgcgcaacatgccgcacaatcctccgggctgttcggcatcggactcggagcgttgaccatgatcatcggattgtggatgctgctgcgtcggcgctgggccgctgtggattcggtgctcgattccgagcaatagcggcgcattggccggcaatggccgactgcaggagggacagaggccccgtttttttgatgtgtacgaacgtacatatacgaggggggcagcacggaacccgcatgaatgctatgattgccgatatgccatcccagtcatcccgagtcgaccccgagcgacagcagcacatcatcgacgccgcgctgcgcgtcatcgcgtcacgtggagtggcaggcacctcgcatcgcgtcgtcgccgccgaggcgcacgtgcccctcggctccatgacatactatttcgacggcatgcacgatctgctgcaccaggcgttcgaccagttcgcccgggcctccgtactgaaattcgccgcgcgcatgcagtccgcctcgaccgttgacgaagcctgcgacgccatcgcgctgagcatcgaacgagacatgctcggcaaccagcgcgacctgaacatcaaccttgagttctacacgctcgccgcgcgcgacctgtccttccgcgacatcagtgaccgctggatgtcggcgacgcagaaggtcatgggccggttcttcgactccgagaccacggtgctactcgacgcgatgatcgaaggcctgacactgcaccgggcgctgggcggggaaccacgcaacccccagtccatccgcgacggcatccggcgcatcatcgaccaccggcgctgacggcaacgggagtgcgccaaaatgcgccacccactgatggatcacataattcagggacacggacctgtaatgggaaacagggtaaatcaacgccgtttgctcataacagtgaaggtcttcttgggaagaaggatccatgaccaatccgaacgcgccgtatgccgcccagccgcagcaatccggctttcaaccgcagccccagttccagccgcaacagccctatgctccccggccggtcgcacccctgcgtacgcagcgcggactgctgaaatacgtgctgctcggtctcgtcacgttcagcatctacgacatctggcagatgagcgaagtgggagacagcctgaacctgctcgcgttcaagcgcgacggcaaacacacaatgcactactgcctgatgttcttcctggtgggatgggtcacgctgggcatcggttggctggtgtggtatcaccgcgtatccgaccgcatcggcgaagaacaggccgcgcgcggtctgcccgtcacggtcaccgcctcgacattctggctgtggggcatcctcggctcgctcatcgcagtgggaccgttcatctatatatacaagctgctgcacgcgatgaatgacctgtccgcggactacaacgtgcgcggcttctgaacgagacacggatcgaaatcgggctccccgccgcagggagcccataatcgcattcagtcaatcagcttgtaaccgtggtcggcaaccacggacttgagcttctcgatatacgtctcggcggccttcgacagtttggcgcgctcattggtgacccagcccaccagcatcgtttcgtcggtgtccaacggcacggtgacgatcttctcattgttcaggtcgccgttgtcgatgccggtgcacaccgtgtacccgttcaggccgatgatgaagttcaggatcgtcgcacgatcggtcacgttgatctgcttgggggagtactccggccacacggcctcctcggcgaagaagaagctgccctcctcgccctgctcgtactggatgaacgggaaaggcttgaggtcgtccatcgtgaccttcttcttgccggcgagcgggttgttgcgcgagatgaacacgtgcagcggcgcacggaacagcggatgaaactccagatgcttctcgcgcagcatcttgccgatcacgtccttgttgaagtccgacaggtagatgatgccgatctccgaaagcatgttcgcgacctggttgatgatgtccttcgtgcgggtctcacggatcgtgaactcgtactcgtcggacttgatggagtcgatcatctcgacgaacgcctcgacggcgaacatgtagtgctgcgtggacacggagcacagctgcttgcgcggcttcgcgttcttgtagcgctcctcaagcaggtcggcctggtcgagcacctgacgggcgtaagtgaggaattcggcgccgtccaccgtcagggcgatgccctgcgaggaacgagtgaagatctcgatgccgagctcgttctccagttccttgaccgacgagctcaacgccggctgggagacgtacagttcatgcgacgcctcgttcatggatccgcactcgacgattttcacgatgtatttcagctgcagcagtgtcataagcagcatttataaggccgaccatggacgaaaccattgaaatcattgggattgccggcatttcaccaggtgcgggggtataagctcaatttatcatgcggcgggcttgcggtgcggtatgcgcaaggcacgctctcaaaactcgcagatacaccggacgactgacgtcttttgccccatatctgcgagttttgagagcaccgaatccggttattcctacagcctcacaccgagcgaagcgagcgattcgcgggcctggagagcattgtcgaacagaagaccgtggataccgacctcgttggccccgacgatgttcttcgccgtgtcgtcgaagaacacgcaatgcccggcttcgaggccgaatcgttgcagtgcgagctcgtagatgtcggcgttcggcttgtgcatcttctcgatgccggagaccacggtgtcctgcagcagttcgccaatctgcgggaatttctcgaacgcgatgtgaatcgtctcatgagaccagttcgtcagtccccacacaccgtacccatgccgcttcaggtcgcgcagcagatcttccatgccgggcagcatgcgcggcagggcgtcgccgtaatgttcgatgtaataggcgaagatcggagcgatgtcctcgccctgctcccgcaccacgtcggggtagatgtgagagaagtcctcgccggcgtccatgcggtcctcatagcggaagaacccgtgcgggtcgtcgggtgcgcatatcgcgtccaccgtgtcctgggggaaatgcccggtcaggcatgcgcgggtctgccagtccagcaggacgccacagaaatcgaaaatcacatcggtgatgggggagttgctcatgatgctcctcaacgttggaatagggggaataggatagtgtctgatttgttgatccggacggaataggtctccggccggcgcagtcgcgcaagcggtcgggatgcgtcgacgccgggtatcatgcgataccggcctccgcatcccgaccgccctcgcgcccttacgacagcagttccgcgaaagtcgcgggaatcatgccgatcacatcggatgcgacgatgggatgccccagcttggtgcgcagatgacggtcatcggaaccgtaaatcgtcgggggcgtgaacccgcgctgatccgactgcgacgcctgagcggctgcatatccgtgcaggtaggcagcgcaggcggcgacatcgggagccgaaacgtcctcgtcgtcctgttgggcgagcaacgcccccagcatgccggcgagcacatcgcccgcccccgcggtgcccagccacgccggggcgcggccggagacgaccacacgcacatgctgctcatcatccgcgaatccaccctgcgcatccgactcccgatcggtgtcggccggctcgcccacgacaatcgtgaccgcacctttgagcagcacggtggcgccggtgagctcatgggcccgcaacgcccaatgcaatggctcgttctgcacatccgacgcatccacatcctcgcccctggcggtgagcagcgaggcgagctccccggcgtgcggggtgatgacgacctgcggcggcacctcgtcgggcagcaggtcgagagcgcccgcgtcgaccaccagcgggggcatatcataggcgaggtcatcatcgtcatccgggtcatcgtcagaggacaacgcataatgcgtcagaagcttggcgatggtctcacgctggaaatcatcatcctcggtctcacccgtcggaacgccggagcccacgacccaggcctgcacgcgccccttgccgagtacggcctccgggaccgcggcgagcaccatatcacggcacacctgcggacccatgtagcggatcatgccgatgtttgtcttggccgcggccttgcacaacagcaccgcggcgccggggtaccgttcggagccggtgatcagaccggtcacgccacgtaagtacttcgtgtctgcaagccgggggagtcggacggtctcagccgcgttgtcgccggaaaccgcctcgacgaacggcatatggccgtcgatgtcgaaactgaagtccaccagcgtcacgcgaccgcaggcgtacgccgcgggaggcagcataaggcacggcttcagggcgccgaacgtgaccgtgacatcggcagggatatacgggcctgtgatggcaccgtcgtcgactcccacgccggaggggacgtccaccgcgacgaccaacgggaactcgccggtcgagtcgccggcgggaagggcggtgcggtcggggatcgtgccgtcgacgcccagcgaggatgcgaccgtgcccgcgatgccgtgcagcgccccgctcaggccgatgcccgtcatcgcgtcgatgatgacatgcgcgtgctgggcgagttccaccgcggcccgaagcctttcaccggcctctccagcgctgaagccggcagcgcaccccggaatctcggaggccgggtcgaggatcagcaccttgccgccggcgcggacgaatgcggcgaacccctcgccatgcagcgtgcggccgaccgcgacggcggtgaccgaagcgccgttgcccgccagcatcgtcgcggcgaacagcccgtcgccgccgttgtcgccgctgccggcgagcagcacaatgttcgactcctccaacgcgacgccctcatcttcgagcatttcggcgacgacatgggctgtggcggcggaagccatcctcatcagtgggacaccgttctcaagcagtggccgttccatctcccgcacgtctcgcgccgtgaaggcggcgtgacgaagaacgtggagcctgttctcatctgtctgccctgccatgatgcatcctccttggttcatggatcgtttccatcaatcggactttgcccgtccctccactctactcgctgtcgagccgtcgcggcgacgcgtctgcgataccgttacacgagttcgcgcgcgcgagcggtacgagcactcgcggcggacggctggaccgtggggctctcacgtgacggctgcggcgacgacacgcggaagtgtcgccgccgctgtacttcaagcgctcgaagcggctaccgtgacatctcaaagcgagtcataatgaccgccgatcgcagtcaaaccgcaaggagatatcatgttcgatgagctgaaaagccgcatgaacaagttctggaacgatgacaggacgctggcacagacagacccggaattcgtcgagctgttctcgaacttcgcttatgacgaggtcgtcaacgagccgggagcgaatcaccccgatctggacgacgccacacgctccatggccattctggcggcgttgatcggatgtcagggtctcgacgacttcgagctgatggtgccggtcgcgttcgaatccggcgtcggcgccgtccaggtcaaggaaatcgtctaccaggcggtcgcatatctcggtttcggacgtgtactgccgttcctgaagaagaccaatgagatactggaagcgaagaacatccacctcccgctcgaaccgcaatccaccacgacgcccgaaacccgcgccgaggcgggcgagcaggcgcaaatcgacatcttcggcgagcgcatgcgaggcttcgcgcaatcagggccggagaagacccgtcacatcaacaagtggctggccggcaactgcttcggcgactattacacgcgcggcgggctcgacacgcgccgccgcgagatgatcacgctgtgcttcctggccgcgcagggagggtgcgagccgcagctcacctcccatgcggtggccaacatgcgcgtgggcaacgacgagaggttcctgatcgccgtcgtctcccagtgcacgccgtatatcggttatccgcgcacgctcaacgcgttgcggtgcatcgccgacgcggcggcgaaggcgtgacagtcggcgcgggccgtcaggcttcctcgtgccagtgcgggtcctgcgcgaaggaacgtccctcgggattgtccatcgcggcgatgcgcacgatcgtcggatccttaagcatctggttggcgtggcccaatgggctccacgcctcggtgatgatgccatgcgcctgatcgtaggagcgctgcccggcctgctggaagaaggggtacagctctacttggttgacggccgacgtgactccggtggagcggatcagcaagtcgatatgacccggcaggaagttgctgacgccgatgtgcttgacgatgccctgcttctgcgcgtcgacgagcgcctgccacgcctcgacgaactggccctgcgacgggttgggccaatgaatcagatacaggtcgatgtagtcgagtcccatgcgggccacggactcctcgatcgtgacgcgtgcctgatcgtactggtgatgacggcccggcagcttcgacgcgacgatgatgtcctctcgcggcacctctgattcgcggatagccttgccgaccacgccctcgttcggacatctatctgcgtttcgaggggttgttgcccgagtagagccgggccggaaaccgcatgattccaatgcgggatgtccccgcatactcgggatatcgcgtttgggcaaccccttgaaacgcagatagatgttccgagagcgcgaaatcaacccctcgaagcggagacaacgggtatcagcctgccagcggaggcaatgaggcacggtaaaaacgggttataggccagaatgtgtgtgtccgggataagccgtcacgtcttgtgctgactggtgtgtcgccgggttgaatgtgggtgccgggaccttcggggccggcaggcggctgcgccgtatcgcggtggcgctcatgcgcgtcgggggcggttcatcgcggaacacgtggtggaaccgtgttcgtgaagttcatgtcccccaagtatgacaaagcgggattccagcgacttgtaatcgttgggatcccgccattcttgtcgggccggcgggatttgaacccgcgaccccttgacccccagtcaagtgcgctaccaaactgcgctacggcccgaacagtgcgaaaagcaccgagaagagaatttaccatatgacgtcaataacgcaaaacaagcgtgtcgcgactcgggtaattcccgactatcacctcgcaatagggagacaccagctacatagacggcatggcccatccaagtcttatccaagttccatctgcgcataccattgcagtgcggcagccagccgccccaccccggatacccccataatggatacgtctgcgggatgattggcgaacgaagcaccacgcgagtagactataggaatgtttgccgaagatctgaaacggacggagaagatgacagtggacgacgtgttcgagcagtcggcgcagaagatgcgcgagcagggcatgagcgagatcgccatctcgcagttcaggcacgcataccatgtgtgggccagcgagaaggagagcgcgtggatccgcgaggacgccgtcgagccgctgcacggcgtgcggagcttccatgacgtgtacaagaccatcgatcatgacaaggcagtgcacgcgttcgccaagactgcattcctcaagctcaacggcggcctgggaacctcgatgggcctgcaatgcgcgaagtcactgctgccggtgcgccgccacaaggctcggcagatgcgcttcctcgacatcatcctcggtcaggtgctcaccgcgcgcacgaggctgaacgtgcctctgccggtcacgttcatgaactcgttccgcacttcggatgacacgatgaaggcactgcgacaccagcgcaagttcaagcagaccgacatcccgctggagatcatccagcatcaggagccaaagatcgacgcggccaccggagcgccggcgtcttggccggccaaccccgatctggagtggtgcccgcccggccacggcgacctgttctcgacgctgcgggagtccggcctgctggacactctgctggagcatggcttcgaatacctgttcatctcgaactccgacaatctgggggcgcgcccgtctcgcacgctcgcccagtatttcgaggacacgggcgccccgttcatggtcgaggtcgccaatcgcacgtacgcggaccgcaagggtggccatatcgtgcgcgacacggccaccggccgactgatcctgcgggagatgtcgcaggtgcatcccgacgacaaggacgcggcccaagacatcgccaagcacccgtatttcaacacgaacaacatctgggtgcgcatcgacgtgctgcgcgacatgctcgccgagcatgacggcgtgctgccgcttcccgtcatcatcaacaacaagaccgtcgacccgaccgacccccagtccccggcggtggtccagctggagaccgcgatgggcgcggcgatcggcctgttcgaaggcgcgatctgtgtgcaggtggaccgcatgcggttcttgccggtgaagacgaccaacgacctgttcattatgcgttccgatcggttccaccttacggactcgtatgagatggaggacggcagctacattttcccgaacgtcgacctcgatccgcggtactacaagaacatcgaggacttcaacgaacggttcccctacaacgtgccgtcgctcgccgccgcgaactcggtcagcatcaagggagactggacattcggacgtgacgtcatcatgttcgccgacgcgcgtctggaggatagaaacgagcccagttacgtacccaacggcgaatacgtcggaccgatgggcatcgagcccggtgattgggtgtgatatgtccgccgtacgaagaaaaaatacctatttttgacaaaatgcgagccgcacacaacaaaaccctctatcatgggatgtggtgtgcgtgatacccatgcatatttaattggaatgctaacgatacgtgaggactaatggcagagggatcgaacgggagacgccgcttttccgacaaatggggcaaacatgagttggatgtgttggccgtgctgtcgtctgcgtttccgcagtggctgacctcgcggcaaatcgcccagcgcgtcaaggcatatgccgactcctacggggaacttgccgatcaggccgcgaaggccgcgttcgccaagcagttccagcgcgaccgcgccaagctcgcggcaatgggaatcgccattgagtcacgccagcctgaatactcctcgaagtccgagggacaggacttcgcgtcgtaccgactgcagctcggggacgagccgcgcatccgcctgcgcttcgagcaggaggatctgccggttctcgccgcggccaactatctcgcacgttcgatttccgtatcgtccacgcaatcgcagaccgtgacgccgcagcatgtgtcccgcaccacgccaagggtgccgcagacgcccatccccggcctcggattggattccatcgccccgggactcggcacgcagacgattccgccggctctcgtgcgcgtcgtcgactcccgccgtttcgcggcgacggtcgacgtggacggagagaacatcaacgtcgcctacaccgattccgacgacctcgccatgttcgtgctcgaacatcccggcgcagtgatcgtcagcccgcaggaggccgtcgacgccttcaaccgtcgtctccaggcggcgtcaaacatggcgctggccgacagatcgtcggacgataccggcagcgccacggtcgccacgcccaccatcaccagcacgacccccgagccggaggacgccgaccccaagaaaaaccaccagaagaagtccgggacctcgttccagaccggcagtgaggtcgaccgcagactgcgtctgatgctcttcctgtccgcccacctcggtgaggaattctccctcgcggaactcgcggaacgcttcatcggcaggcccaagtcggatgacgagctcaagaaatacgtcaacgtgatccacaaagacatcaacacgctgaccacggtctccgacgacggcgagatggccggaagccagttcttcgacatcgattggtcgctgcttgacgccgaaggcatcgtgtccgcgacgaattcgctcggactggaacgcctcgccggcatctccccgcaatacctgagcatgctcaccgcttcagtgagctacctcgcgcattcgccgctgctgccggaggcgcagcgcacgcaggcggcctcgctgtatcagcgtctgcgccagctggtcaagccgggggagaccccttggctgagcctgaccggctacgagctggagccccactgcttctccgtcgtcaagcgcgcgatctccaccgaatcgctgctcgacatggagtacacggacggcgcgggacggacccgccgcaaggtcgtcgccccgtccaagatcttcgtggatgagggcgtctactatgccgccgtctggaccgacgtgctggactccactccggaggaccggcgcaagttcgtctcacgcgaccagctcatcaacaaggcgaacggcaagccccgcacatggcaggtgctcaggctcgcccgcatcgagcacgccgaggtcatcgctccggtcaagcgcgtggacattcccgacatgccggtgagtgagttgcgcaagtggagcttcgacaacggcactccggccgtgttcatcacggatcagccggatcttccgttcatcaagtcgatgccgggagccaccgtcgagccgtgcagcccgggcgagaaggtgcatatcatcgtgtcgtccgattcctggttcgtcgccttctgcatcgcccatgcgcgtcacatcaccgcggtcgcacccgagaccctgcgcacgatgatcgtcgcccgtgcgcagcgcgagctcagcctcggcacacgtgaagaagacaccccggaagaggagtgatctcatgccctggtggatctggctcattctctcgctgttcatgctggcgatgatcgtggcgggcatcgcgtacgccgcccttcacggcttcagggcgttgaacggcattgcggagatcggcagccgtctcggcaagcccctctccgagctcgcggacgttccgcagggtgcggacgtgcgcgagccgctcgcccctccgacattcacccaaccgttgaacagcgccatcagccggtatgacgatgcgcaggtcgacgtcatcaggcaccggaacgcgaagcgcgaacgtcacgcgcgtgcgtgggcgcggtggtcacgtttcaaccgttgacggactgcggctgcaagctgcggcgcggcccgcggcatcgtctcatgcacgcaggcgaatacgagaatccgacggcgatggccgtctgtgacgaacggggtttcacgcatggtcaaacatcagcgcaatcattcggcggcggatcgacccggcccatcgccttcccagcggtatgccgcattccagaagcgtcaggcgcataacgcgagcgtcgccgcgcgtttcgcagccacgctgccgttcgacctggacgatttccagcaggacgcgatagacgcgttggagcggggggagaacgtgctcgtcgcggccccgacgggcgcaggcaagaccgtggtggccgacttcgcgatgtatctggcccgcgagcgcaatgtcaaggcgttctataccacgccgatcaaggcgttgagcaaccagaagtaccatgacctgaccgccgtttacggcgccgaccgcgtcgggctgctgacgggcgacatctcgatcaactccgaggccgacatcgtcgtcatgacgaccgaggtactgcgcaacatgctctacgagcattcgaccacgctcaacgcgctgcggttcgtcatactcgacgaggtccattacctcgccgaccggttccgcggcccggtctgggaggaggtcatcatccatcttccccggcaggtcagcgtcatcggattgtccgccacggtctccaatgtcgaggatttctcgtcctggatatcctccgtccgcggcgacactaagctggtggtctccgagcgccgtcccgtcccgctggagcagcatgtgctcgtgcaggccgacgaccacaccgagccggagctgctcgacctgtaccggcgtgacgcccagggcgagcagaccaccaagctcaacgcgcgcctgatcgaccggctcgatcagcttgaccgtcaggcggcgcgccgccgcggcaccgagaactcacgctcccgcggccgtggccattcgcggggccacgtgccggcgcagcgccacacgcccaagcgctgggcggtggtcgacgagctcaactatctcgacatgcttcccggcatctatttcatattctcgcgcaacggctgcgatcaggccgtcgagcagtgcatcaatgcggggctggaactcaccaccgaggacgagatgcggcgcatccgcgccatcgtcgacgagatggtcgccgggcagttgagccaggaggatctcaaggcgttgcagttctcccggttcaggttcgcgctggaggagggcttcgcgtcccatcacgccggcatggtcgcgctgttccggcagatagtcgaacgcctgtttgaagagggactggtgaagatggtcttcgcgacggagacgctcgcgctgggcatcaacatgcctgcgcgctgcgtcatcgtcgaaaagctggagaagttcaacggcagcgggcatgtgccgctgacaccgggggagttcacccagctgaccggccgcgccggccgtcgcggcatcgatacgatcggacacgcgatcgtcgtcgaccatcgcgatttcgtacctgcgactgccgccgcattgtccagcaagcgcgtctacccgctgcattcgagcttccatgccacgttcaacatggccgtcaatctgctcaacaccagcgactacgagacgactcgcgccacgctggaccattccttcgcccagtgggaggccaacgagtcggcctggcagctcgaatcgcaactgaccacgctgaaacaggcgttgaacggctatgagcaggcattccactgcgagtacggggatttcgcgtctctgatgcgcatccgcatggagctgtccgacctggagaagaacggccggcgcaagctcaagcagaccgccttcccgaccgacgagcagcgcaagaacacgttccgcgagctggaccagtccatcgagaccctgaagaagcgcgaccgcgaacatccgtgccagcagtgccccgacatgcagcagcatatgaaatggggccatcgctggattcgcgagatgcgcgaatacgagcgggtgcagcataggtacgagtcgcgcaccgggtccgtggcccggcagttcgaccgtatctgctccatcctggaacagctgggatacgtgaagagcgacggggcggacatgcgattgagcgagcaggggcaactgctgcgccacatctacagcgagcaggacatcgtgcttgccgaagcgctggaacgcggcatgttcgaccatctgacggcgcgacagctcgccgcggtgctctccgccctggtgttcgaagccaggggaggcaccgggggagaaccgaggcgctggcccggcggcatccaaggcccggtcgcccagacttcgcaatctttggaccgtctgcatgcgcagctcacgatgctgtgcgaggatgaggggcttgacgacctgcagcaactcgacttcggcatcgtcgacatcatgtacgaatgggccagcggcaacagtttggcatatgtgctgcatgaccgggacatgaccggcggcgatttcgtgcgcaacgcgaagcgtctgtccgacatcctccagcagatctcggcggcagagccgtatctgccgcaggggagcgcgcacctcgcccaggtcgcgcacgaggccatggaactggtcaaccgcggcatcgtcgcctattcgggcatcggcgagggctgacggaatcgtcgcaggcggcaaggcaggaccggaacggggaatatacgactcgtccgaactgttttgtagcgtgataatagttttcgggaaagatcgacaagaaagaccacaaggaggaacgtcatggcggaacgcagcctacgcggtatgagcatcggcgcgaaatcactggaatccgacgacaacgtggacttcgccgcacgcagcgaggtggcgtacatctgtcccaaggggcaccggaccatcctgccgttcgccgagggcgccgaaatccccgacgagtgggaatgccgctgcggcaccatcgcgcaccgcgagggcgacggcgacgaggaggccaacgagatcgccaagcccaccaggacccactgggacatgctgctggagcgtcgcagcgaggacgaactgaagaagctgctggacaagcgtcttgaaatgcaccacagcggctggattcccgactacgagtaaggggagaggcatgtctcagcatcaggtcacgacccggcagcgcaggaacgtggtgctgctcgaccttgacggcacgttgacgcaatcggacccgggcatcatcgcctgcgccaccaaggcgttcgaggagctcagcctgccggttcccgacgatcaggagatgcaccggttcatcggaccagccatcatcgaatcgttcagacgcaaccatatgccggacgagctgctggaccgcggcgtggagatataccgcgaatactatgcggacaaggcggtgttcgacgacccgaacaatcccggccacaaaattcccggacgactgtacaacagcgtgtacgccggtattcccgagcagctggcggcattgcgcgcagacggcttgcacctggcaatcgccacgtgcaagccgcaatatcaggccgagccagtgtgcgagcatttccatctcgataccatggtcgacggcatctacggcgccagcacagacaattcgcgcatcgacaaggatcaggtcatccgatactgcttcgacagcatcggattcgatgcggatgccggtgaccgcgccctgatggtcggcgaccgttggaccgacgtcgacggcgccatcgcatgcgggctcgattgcctgggttgccgttgggggtacgccgaagccggtgagcttgaggaacatggcgcataccgcatcatcgataccgtcgatgagcttgccgccgcggtgaatgattatttcacgaagtgaccatctgacataccgtactattatccgataattacgctgtgcgacagtgattcgaccgggcttcaagaatggctttatttcaacggtttgaagccatgttaatcagcggtctggaccgaagcctgccaaaggtagccaaacccgtatatgacaattggctatggagatgaagcggcccatggcctcggtttgcattgcccttgccgtgggtcggtttcatcatacccggcgtccatctgcggacgagccccgatgcgtcgcggtaggccaccgtgccgcgctccgaccttcagaagccctgccattccggcgtctcgcggctcctgtcgaagtcgaagcagccatccctcagaagggccatgagatcgggttcgacgggttcgccggtcacagggtcgttgacgaccagactcaggttggcagcgttgcgcctcacggcggagattcgccatgacttcggcagaccgccgggttcgaacgtcacgaggcggtcgtccagcaccacgcgccaagtgtccgtcaggacgttgcgcgggtcgcggtcgggcaggtcgggcgtcgggcgcacgtcgtcggggctgaccttctcgaagggcccttcagccttccgactttcgcccagcagcaggtcgtccggcgaggcatccgtccctgtcagccaattccatggacattccggcccgctccgccccatccacagtctgccgcccccgtcgcgccacagtgccacggtctccagctccttcgacatatgcttgccaacctttcgacgttgttttcctatccatccaaggcatggtgcggaaagcggccggacagccaacggcatgactggttacgcggtggagtcccatatcccggcggagcatttcatgtcctcactgaccaaggtgtcctccacgacgagggcgaggcacagggcttggatacgccggtacgcgcgtggcgtctggcgggcggcaatcgaagcgggcgcatacaggacggagcgcttcgttgccttggcgatggtgcagtggccggggccctcgatctacccggcgatgtcctgcgcggagacgctgaagtcagaggaaccgggagaattgaagggtgcggagaggaaataggttcgaccgagccgtttcttcctccgggatgtaagcgcgaacaacggtttgttgtacccgcgcttggcgaacgggccatgcccttagaatggaatcagcaagtgcacagcgaggcactcgaatcgttttccgatgtcgggaggtagtcatgtcaatcggtcaggttatcaaagtcgtgcgcgaggagcgaggtcttacgcagtcgcagttcgcgcacgagctgttcgtcacccaacaggcgctttcccgctgggagaagggaacggcagagccgagcatcgacatgattcggcttatcagcacccgttttgaggtgccgatggcgaggcttatggagatgccggacaacggtttttgccaaagttgcgccatgccgttctatcgcccggaagaccatggcaccgaaccggatggaacgcgaagcggagattattgcaactactgctatgacgacggcgtttttcttcaggactatgccaatagcgatgaattggtcgtcgcgtgtgcgccgatgatggcggaatcctgccatatcagcgtcgaacaggccgaggattgcatgtcggcgctgctgccaaacctcaagcggtggcggcatcaggacgagatcgatgcggtggcggaaggggaatgagcgatggcgttcgattataagaaggagtataaggacctgtatcagccgaagaccatgccggccatcgtcatggtaccggcgatgcggttcgtcgcggtggacggtgtgggcgacccgaacgaagaaggcggcgattacgccaaggcgatgcaactgctttacggcatttcgttcaccgtcaaaatgagcaagaagtcaaagaacccggccgcgcatatcgacgggtacttcgactacaccgtgcctccgctggagggcttatggagcatgggggagggtgtgcccggcgtcgattacgcgcacaaagccgacttccattggacttcgatgattcgtctgccggaattcgtgaccgataaggtctttggtgggccaaggcatcgtttgccgccaaacacccggaatccgacgtcaatcgcgcatatctcttcgatttcgatgaaggcgtggtcgcgcaggtcatgcacaagggcccgtacgacgacgagcccgcaaccgtggcgattctggatgactacgcgcgctcgcaaggctacgagctcgacctctccgacgcccgccgacatcacgaaatctacatatccgatccgcgccgagcaaaaccggaaaacctcaaaaccgtcatccgtcatccggtagtgaaggtgggttgactttcagcgaactgctcgaagcgctcaccgggcggaccatcttggccgggttcctccgttgcgcacgtatgcgtccagcttcatcctgagcctcgcgttcgccaccgccttggtcttgccttgggccgtgagccgcctcctgcgcccggtggccctgtcgggctctatgtctatcgcggcgtgccagattccatcggcgctcttgtatgtcgagccgccgccacccattgccatcattggtctcccgtcgtgtgaaatgcgtagccaaatgcgtagccacaacgggccacccagaggcatccacagttacctgtgcgaaatgaagaccgttgaaattaagccgtttctaatattcccaatagttagccgataatgtacgttatgtcagatttatgatcttcgggacaattgacgttccgcttttgcacttttatccggcgaaagtcctatttcaagacgtgattatgggactttcgccggataaaaatatcttcgtgcagattttggctgtgttttttttcaggtaggtggcggtgaggatgagccggaggccggcgaggaagacctcgtcgagcctgtcgtactcgtgcgcgcggtccatgagcgggcacgcgcccatgaacgcgttcgatgacttctcatgcatcatcaccagcaagcaaacggtcaacatgccggtcgtagaggtcaagttcgacaacgacgacaacgaggtgcagggagacactttgttgggggaactgcccatcacgttccaaaccgacagctcgggatcatggaacatcgaattggacgcgacgaaactgacgccggatgctcttggtacgaacgcattcaacgtaatctatacacttgcagcggtgaacgtatggccagatatcgttatggattggggtttgccatatgatggcaaaccccaaaccataacgatatattctcgtctcacagacgcatgcgtcacgccacggtatgcgtggcgccgcggaccacgcggtcgacttcggtgaaatgcgcacgatgcgcctggatacccatcagcaacagctccacaaaaaccagcgcgatgactatcgccgcgccgatcaccaagtggtcggtgtagaaatcgtggaatgcgggggacagttcctcgctcgccatgagatacaccatgaaggggatgcccgcgaacagcacggacaccatctgggccagcaccacgttccagctgacggggttcacctcggggtgcctctcccccgtgccgaaccggcttctcacaatgcagatgccgcacaccgagagcatccacacgacggcgaacacccacaacaacagcggaagcagatcatccatacgccagcctccggttatgccgcctcgcgtgcggcacgctgggcggcaatcttcctgcgcatgcgcatggcggtaagctcgtcgattggccgaccggcgacacgtcccgaccctgcggagccgacgttcgccgaggacgactgcagatcgacgtagtcctcggtctccagcgcgtcatgaatctgatgccacagcgagccgacggacacgccgaacacggccttgccgctctgcagcagtgcgatcatctggtcgctggtggtgcattcatgcacctcttccccatcgcacatgatggtgacatgctcaagctggtcgacatcgcgctgcatcaggaacccgatggccgtagtgacgttctgcaggttcacgcctgcatccagcagcttcttggacaccgcgagaatcaccacgtccttgaaggagtacagccgcctcgaccccgatccgtgagatggggtgatcgatggttcgacgatctgcttgcgcgcccaatagtccagctgacggtacgtgatgccggcgaccttggaagccaccgtaccacggtagccccgtgtcgggcggctggcgccttcgtcgacgaacagctccccctgcacggcgtcggacgcaccgagatcgagcctctgctccagcggcacgaccagatgcagcccggccgtctggctccctgtctgctcagccatcgcactcccccgtcctgtgcatgcgccgaaccggcacatgcacgatcacatgaatgtcgtaccgtcccagtctaacgcgcacggcttcgcatcatcacgcgataacggcggatttggtgaagaaaaccagacggaacttaccgatcatgatctcgtcgccgttgcgcagctgctgatggtccacccgctggcggttcacataggtgccgttgaggctgccggaatcgtataccgcgaatgtgtcgccgacgcggcggaacacggcatgggaacgggataccgtcgaatcgtccagcaggatgtcggcgcgggagtcgcgcccgaccgtcacctcgtcctcatcgagcaggtagcgggacccggaaacggcgcctctggtcgagatgagcagtgcggtgcccggtgcgagccgcgcgatggtttcgatgtcctcctgcgtgaggggacggtcacctgtagtggtgatgggaatctggatggcgggcagaccaatgatggtcgtctcgcctgcacttggaatcggatctgtcataaacgctattctacagcccttgcatacgtattgtcggttgacttgcgaatttggctgatggtaatcgaatccgaggacgtcacgctcaccgtcgcgccgtacttcaccttcagactcgaacccacgccacccgcgatattgacggcgttctgaaggttctggggatcgccgatggccaggatccgatacggcgcgctcagcgcgacaccgtcgcattccaggccgtcgtccgtgtcgctgacataggttttcgtcacgacacgcacgctgttgatggccatcacctcggcgcctgcgttgcgcagttcctcgatgagtttgtacatcgtcgccgcgtcgatcttcgtcttcgacccttgggagatgctgatcgacacgcccttgcccgtcgcgggcaaacgaccggcgaggatgccgttggtctcctcgttctgcttggcgatgcgctccgcctcctgcgtcttgttcgccgcggccttgagcgatcccagctgattggtcagctccgacttgcgctgctccaggttctgcacctgtgtgccggtctcgctgatcagcctggtcagctcgtcctcgctcagcgtctcgtatgtggcgtcggcgttgttgatctggatcatgtacccgtatcccagcagcgcgcacatgatgaggatgagcacgctcgtcatcaggcgcatgcgcgccgagccgtccttgacggggcgcttcggcttcttgcgcaccacggggaacgagccggtctccatgcgatcgttcttcttgtcctgcgcatgctgctcgtgcagctgcgacagcacgtcacgagacgatttgtgcgccaccatggttcatcacccccggaagatgaagcgacggatcgccgacacgttcgagaagatacggattcccagcacgacgatgacggccgtctgcagctgggatccgacgcccagctgattgcccaggaacaccagcagcgtcgcggtgaccacgttcgagatgaacgagatgacgaacaccttgtcggagaagctgcgctcgaagtacgcgcgggccgctcccagtagcgcgtcaagcgcggcgaccaccatgatgggaagatacggctgcagaatgatggggatatccggcttgacgaacacgccgagcaccacgccgatgatgagacctagtaccgctgccatctactcgctcctctttgcataggacaattcgccggaaggcgccgcttccagtgtaatcgaactctctttattcacctgagggtatatgcccgcctgggcgaacgaatcatacagactgcgctgcgtggacttgctgaccgcggaggccagcgtgtcgcggtcccctatcgcctggattgtgtacgggctggtcacggcggtgacgccgacgagaatgttcgatcccgccttgcgcaccgatgtctgcacgccgagccggttgccgttgatggctatgccctcggcgcccgcctgccacagcagtcgcaccagcagccgcaggtcggcgtcggtgaccacgcgaatctgcatgccgctggactcgcgtggcgtcgatgccccgtcggagccggcggcgatggggtcggccagggtcaggctgatgcccggcccctccacggcgacaagcccgttgaccatctcgtcgttgaccagcgtcgaatcctcacccgtgccgcccagcttcttcgatcgttccgtgacctggttgcgcagattgttgacttcgttcatgagcgtgtcggcctggccgcgcgtctcgcgcagctcgctggcaaggctttgcctgacgaccttgcgcgggtcggaatgtagccgttcgatgaacagcgacccgtagaaaccgacggcgatgcacatggcgaacaccagaaacttcgtcgcccacgtcgacagacgcgagcgcggacgctggtcgagcctcgaatccgagaacagcggatccatggggcggttggtgagatcgtcgatgagcttgagcgaatcgtcatgcagccgtctgcggcgggccggcatggtctgcccgccttccgcgggcctgacatgccgggactgcgactgggccacggaatccgaaaacaccgcacgacgtttcaccggcgcgttctcggccggcacgggaaacgacagcggcttgatcggatcagcgtccatcggcacgtttctctttcaccagcagtgaaatgccctgcttgctgtagatgcaaccggcgagccagtacagtccgacgccccagatgccggcggccagcgcggcgaggtgcagaagcccgacgaaggggttctcccagatgtcgcagaaaatcagcgcgacgatggagaccatcagcatgaaagtgccggccttgccgacgaaatgcaccggcagcgggccgtaatcgtattgagcaagccacagcacgagcagcatcatccatgcgtccctggccgcgatgatgatgatcatccaccaggggatgatcccggcgacgcccaatgcgaggacgctgcagatgatcagcaggcggtcggcgatgggatcgaggatctgcccgatcttgctcacctgattgaaggcgcgcgcgatgatgccgtcgaggctgtcggtgatggccgaaacggcgaggacgatcagtgcgggcaccatccggtgatcggcgaccagccatgcgataaaggggatggacgcgattctcaggacgctgatgaggttcggcacggtgaagtagatgtccctcggctcggggctgtactcctggttgaacttctgcttgatcttctggcggtatccgccgtcggcgtgctgctgtgtacccattgtcgaaccccgttcgtcacatgcgggaggcctgcagcgcggtcacgatgatggcccgggcacccacctcgtacagcttgtccatcagctggttgaccttcgccttgggcaccatcacgcgcaccgcattccactgcttgtcgtgcagcggggatacggtcgggctctcgaatccgggggtcaccgcgacggcggccgccaccttgccgacggggatgtcatagtccatcagcacgtagcgctgcgcggtcagcacgccctgcaggcggcggctgaggatggtgagccgctcgtcctcggggtcgaggcgcggggagcggatgagcaccgcttcggagtgcatgatggggtcggcgaagatgcgcaggccggcgttgcgcagcgtggtgccggtggacaccacgtcggcgatgaggtcggccacgcccagctgcaccgaggactccacggcgccgtcgaggtggatggtctcggcctcgatgccgtgcgccaccagatagtcgtgcacgagcttgtcgaaggacgtgcccacacgcttgccctggatgtcctgcagcgtatggaagtcggaatcgttcggcgcggcgaagcggaacgtggacgcaccgaagccgagctccatgtgctcgctggcctcggtgccggagttcagcagcaggtcatggcccgtgatgccgacgtcgatggtgccgcggccgacatacacggcgatgtcgagcggccgcagatagaacagctcgatgtcgttgtccgggtcctccaccacgagctgacgcggattggaacgcagacgataccctgcctcggacagcatgttccaagcgggctccgacaacatgcccttgttgggcactgcgattctgagcatggtgtttctccctccagaccggccggtctgtttgtcacaggtgcttataaacgtcctccagggtgatgcccttggcgatcatcatgacctggagatggtacagcagctggctcatctcttcggccgtgcggtccgcgccctcgtattcggccgcaatccaggtctcccccgcctcttcgatgatcttcttgccgatgaagtgcgtgcccttggcgagctcgtccacggtcagggagccttcgggcttggtgacggccttctcggacagttcggcgaatagcgattcaaacgtcttcatgatatgtgtcccttgagattgtgcatggttgaggcactcgacggcgtcgccgcgatcgcggtccggcattggtgtcggagccgtcgcgtgccatgttctgcgtttccgccgtcagtcgcggtatgcggcagcggccttgtccctgatctggtcgatggcctgggccgggctctcagcgccgtacacggcggagccggcgaccagcacgtcggcgccggcctcggcgacgatgtgggcggtcttcgggctgacgccgccgtcgacctgaatatgggtggacaggccccgacgcgtgatctcgtcacgcaggcgacgaaccttcgccatctggttgtccaggaacttctgtccgccgaaaccgggttcgacggtcatgatcagcaccatgtcgaactcgtcgaggatgtcgaaaatcggttcgaccggctcggcgggacgcacggcaaagcatgccttgcagcccatgtcacgcagctggcgggccagacgcaccggcgcgtgggtggcgcccatatggaacgagacggaggcggcaccgagcttcgcgtattcgggggcccaacggtcggggtcctcgatcatcaggtgcacgtcgaccggcaggtcggtgacctcgcagatgcgcttgacgatgggctcgccaagggtgaggttcggcacgaagtggtggtccatcacgtcgacatgcacgaggtcggcgttggcgatggccttgaggtcgcgttcgaggttgcagaaatcagcggaaaggatgctgggtgcgatttgtatgctcatggctctcattctatggtggaagaacgacgagacggcttgcgcctacacgacgttcttgtttgtgtgttatggtattgcggttttctatgctcttgtgcgatatcctgattcggacggatgcgggcgctcagtcctgatggacctcgctctcggcggtttcggcgggagtctcgggcttcgcggtcttggccgtcttgccggatttcgcagcggcccgctcctccagctggcgctgacgttccatctcgtcggccgtgaccgcgcgcagtctggatgtcaggtcgcgtgtctcactgccgaagcgccacaacacgacgaacaggatgcacccggcaaggaacacgatgatcgcggtccacacgttgactcgcaggccgaggatgatcgtcgaatagttgatgcggatgctttcgatccaggtgcgtccaagcccgtaccacatcatgtacatggcgaactgctgtccggatttgagcacgtcgacgagtttgtggccgagccacacgataatcgcggcgccgatcaggttccagatcatctcgtacaggaacgtggggtggaacagcgtgccggtcgggcatgcctgtccgttgtagcagatctcacttttgccgatggcgtccgcatcgttgagcttgaggccccatggcagcgtggtcggcatgccgtacagttcctggttaaaccagttgcccagtcgtccgatggcctgcgctaccatcagcgccggcgcgatgcaatcggccagcagggcgaacggataacgccggtggcggcaccacaggaacgcggccaaggcccccaccccgatgccgccgaagatggccatgccgccttcccacaccttgaggatgttgatgaggttgccggttggcgggaagtagatgtcgggcgtcgtgatgcagtggtacagacgggccccgaccaggccgcagggcactgcgaccagcgtggtgtccagcacctggtcgaaggtgcccccgttcttcttccatctgacggtgaggatccacacggcgaagatgattcccgtcaggatgcagatcgcatacatgtggatcgtcaccggtccgatggagaacttggagaaccccggtgaggggatatacgcaagattcatgcagtgcctcgtttgtctagaccgctgttaccgccatctaccctaccccatggccggcggatgcacggtaaaggcagcccgccggcgcgggggtgtgtcagcgtgactcgttgtggatgccctcggacagcgcctcgaccttggcggccaggtcgcgcagtccttccttcggcgtcttcgcggtgacgttgtcgtcgtcaagcagggtgtgcaccagagcagaaccgacgatgacgccgtcggcgtaggcgccgaccttcgcgccctgctccggggtggatacgccgatacccacgcacacgtttctcgccccggcgttgcgggcacgctcgacaagcgtttcgggcgatgcgctgatggtgtcgcgctcgccggtgacgcccatacgggatgccgcgtagacgaagccgcgtgcgttgcgggcgaccagttcgagacgttcggaggccgaatccggggagaccaggaagatgcggtcgagtccgtgacgatccgaagcctcgatccactcgccagcctcatcggggatgaggtcgggggtaatcaggccggcaccgccggcgttctcgaaatcgcaggcgaaccgttcgacgccgtaatggtagatcaggttccagtaactcatgatgagtggcacgccgccggcgttggccaccgtctcgaccgccttgaacacgccgttgatgctttccccgttgttcagggcgatctggctggccgcctggatgacggggccgtccatcaccgggtcggagtacggcaggccgatctcgaccgcgtcggcgccgtgctcgaccatggtcctgagcgcgtcgagtgagatgtcggggttcgggaagccatacggcaggtatccgatgaaggccggcttgttctcggccttgagccggtcgaacatggcttccgtcgcactgggcttgtgactgatgccgagcggctgtccggacggcgtggttgctgtattcgtcataatcaaaaactccttctgcttcacgggccggttcaggcgacggtgtcgccctgcgcgccggtgacatcgagcgccgcggcctgctcgtcggtcaggtatccgaaccatttgcccgcggtggccatgtccttgtcgccgcggccggagatgttgacgatcatcacggccttgtcgtatcccttggccttcagatcagcggcggccttgaaggcgccagcgacggcatgcgagctctcgatggcggggatgatgccctcggtctggctcaggtcgcggaaggcgttcatagcctcctcgtcggtggcccaggagtagttcacgcgcccgatctccttgagccaagcgtgctcggggccgacggaagcgtaatcgagaccggccgaaatcgaatacgtgtcgagagtctgtccttcatcggtctccaacaggtagctcttggcaccctggaacatgccgagctgtccggtgcccggtgcgaaacggatcgcatgatggcccgaggccggcccgttgccgcccgcctcatagccgtacaggttcacgcgctcgtcgtcgaggaacgcgttcatcacgccgatggcgttggatccgccgccgacgcacgcgcacaccgcgtccgggtggtcgatgccgtaccagtcctgaagttgctgcttggcctcctcgccgatgatcttctggaagtcgcgaaccatggccgggaacgggtgcggtccggcgaccgtgccgagcaggtagtgcgtgtcggcgacgttggtcacccaatcgcgcagcgcctcgttgattgcatccttgagaatcttgtcgcccagtgtcacttcgacgacctcggcgcccagcatgcgcatgcgggccacgttgagggcctgacgtcgggcgtcgatctgtcccatgtacacacggcacttgagccctagcatcgcgcacacggtggcggtggccacgccgtgctgtccggcaccggtctcggcgatcacgcgggtcttgcccatgcgcttgacgagcaacgcctggccgagcgcgttgttgatcttgtgcgcgccggtgtggttgaggtcctcgcgcttcaagaagatgcgggcgtcgagtccggtcctgtccttgaccagcgcggcgaatcgcggggcttccgtcagcgggctcgggcggccgacgtaccgctgctgcagcgtcatgaattccttacggaactcggggtcggccttggcctgatcatagatgcgctccagctcgtccagagcggtgatcagtgcctccggcacgtatcgcccgccgaactgtccccaatatggtccctgatgctcgctcaacggggtcgattcggatgctttcactctctgacctgcctttactagtcgtcgtacggcggccacatggtcgtcggcggtggccacgccttcgcccaccagcacggcatccgcgccggcgcgaccgtaatcctcgacctcgaccgaaccgaacacgcccgactctgcgacgcggatcacgtcatcgggcagtccttcggcgagttcggcgtatttgttcacgtcaaccttcaggttcttgagattgcgcgcgttgatgccgatgatccgggcaccggccgcgaccgcgcggcggatctcctcggtggtgtgcgtttcgacgagcacggccatgccgagctcgtgggcgagttcaagcaggtgcgcgagcttgtcgtcgtccagcgcggcgacgatgagcagcactaggtcggcgccgtgggcacgcgcctcgtagatctggtagtcggtgacgatgaagtccttgcgcagcagcggaatgtgaaccgccgagcggaccttgccgaaatcgtccagcgagccgaggaaccgtcggccttcagtgagcacggaaatcgcgctcgcaccgccgcgctcgtattcgcgggccagggccgccgggtcggggatatcgctcaaatgccccttggatggggaggcgcgcttgatttcggcgatcacggggatgccgtccggacgcttgagccatcgcgtcgcgtcgataggcgccggcgcggccagagcggcccgcctcacatcctcaagagacacgacacattcgcgggaacgctggtcttccaacgccccggcaaccaattcgtccaaaaccgacataatgctcccttatagatcgttcggtcagtcgccactgtaattcatggcagacgacaaccgcgcgttccgtcctacattctgggcgtggccgcgggccggagcgggccgggatcgtggcccggcaacgaaggcggccgccgcggaggaatccgcgacggccgcgcatgcacgctcatccgtgcagggagagaccccgcgtcacttgcggcgcttcttctccctgatgttgacggagatctggatcggagtgccttcgaagccgaactcctcgcgcagggagcgctcaaggaaccggcggtagccgtgctccaggaatccggtggcgaagatcacgaagcgcggcggacgcgtggacgcctgcgtggcgaacaggatacgtggctgcttgcctccgcgcagcggatgcgggtgcgcggcctgaatctgaccgaggaaggcgttgagacgcccggtgggaatgcgcttgtcccaggattccagtgcgttgcgcatcgcgtcggcgaggcggttcgtgtgccatccggtcttcgcggacaggttgacgcgttgcgcccacgtcacgcggttgaactcggtcttccacaggcgctccagccgctgccggccgaaatcgtccatcaggtcccacttgttgaacaccagcaccactgcgcggccggcgtcgaccgcctggctcatcaccttcagatcctggtcggagatgggctgggacgagtcgaacaggaccagcgcaagctcggagcgctcgattgcggcctgcgtacgcagggacgagtagtagtcggcaccggacaccttgtgcagtcgacgcttgatgccggcggtgtcgataaacagccagtcctcgccgtcgatgtcgatggtctcgtcgaccgggtcgcgggtcgtgccggcgaggtcgttgaccacggcgcgctgttcgccggcgagctggttgagcagcgacgacttgcccacgttcgggcggccgacgagcgcgacacgccgcagatgcgtaggcgtgaggaagcccgaggtcttgtccgccttgcgcagcgaatccagcgcggcgtcaagcaggtcgccgactcccctgccatgcatggccgagatcccgtaaggctcgcccatgccaagcttccagaactcggcggtcaggtattcgctggccccgtcgtcgaccttgttcaccgcgagcgtgaccggcttgccgctggcccgcagcatcttgacgatgcgctcgtcggtgtccgtcagccccacgtggccgtccacgacgaggatgaccgcgtcagacagctgcacggcgatctgcgcctgcgaggcgatggcggattcgatgccttcgacgtcagcctcccaaccgccggtgtcgacaagcttgaattcggtgccggaccattccgcgtcgtagctgacacggtcccgggtcactccgggcgtgtcttcgacgaccgcggcgcgacggccgaggatgcggttgacgagcgtcgacttgcccacgttcgggcggccgaccacggcgagcactccgacggccttgggagccggcgactcgtcttcgatcccgtaccgggaaccggcgatgatctgctcgtcgccctcatccagttcgtaatcgctcagattggcggcatactgctcgtactcctgcacttcgaccgcgtccgcgaccagcgtgatcagcacatccagcgtctgctggaaatccatatcggagttgtcgacggtggtcacgccgtccgccgcggtcaggaagctggtgaccttggaatcggcgcggtcgcgggcggccacgtcctcgccccccacgccggcgccggcgacggcctgccccgtgcggcgcgcctgacgcacctcttcccgggcggtcagcagcacacgcacctcggcatcgggagccacgaccgtggtgatgtcacggccctccgcgacgatgccgcggcccagcgagaaggagtcggccgcggactcgcgcgcaatgtaggcgcgctgcgcggcgatgagcacgtggcgcaccgggatgacgttcgacaccttcgacacgtgcgaggagacctcagaggagcggatggcctcactgatgtcctcgccgtcggcggtgatgctcggatggtccgggtcgacgccgatgtcgaagtggtcgccggtgaagaattcggcgactgcttcggtgatctgctgctcatccacctgatcgccgtcgaggtcgatgccctgatgcaggcaccaccaggcgcatgcgcggtacatggcgccggtatcgaggtaggcgaagccgaaatggcgggccagcgccttcgaagtggaggactttccgacgcccgcagggccgtcgatggcgactcgtatcacagcccgacctccttctgcagagaacggacctcgacctgggacagcacacggtaggtgccggacttgaggtcaccgagcttgatcggcccgatctgggtgcgcaccagacggcggaccgggtatccgatggcgccgaagatgcggcggacgatacggttcttgccggagtggagcaccaccttgacgatggtctggtcgcggttggcgtcgatgatggcgcaatggtccagcttgaccaggccgtcatccagctggacgccctgggtcaccaggcgccggcagacgttgccgccgatcttgccatcaatcgtggcgatgtaggtcttctccacctcgtacttcgggtgcatgacgtgctggctcagctcgccgtcgttggtcatgaggatcaggccctcggaatcgtagtcgaggcggcccatgtggaacacgcgctcgtacttgtccccgatgatgtcggccagcgtgtagcggcctttcgggtcgtccatggcgctgagcaccttcttgggcttgttgagcgccaacgtgacatggttcgggttgaggtggacgcgcgagccgtccacacggatgtgctgcttcttcggatcgacgcgggtgccgagttcggtcaccagctccccgtcgacctcgacacgcccatcggtgatcatctgctcgcacttgcggcgtgatccgaagcccgcttgcgcgaggatcttctgcaggcgaattccttcgttgttgttgtcgtcatgcgctttgagtgcgcgcgaatatgcgtttggcatcgttctcccaacgtggccggacattgacaatgaatctgcgctcccggacaaactcacagggaaaacacagccaatacattgtatcgtatcgtcccccccgttggtaaacttgcaacgttcggcgggtcgcaaagcccgcaacatcagaaaaaggacactacaacatcatgactgaagaacagaacaccgagccaagcgcttatccgatcggggcgcgcgtgtgcgcggagcttgcaggcagcttcctcgtctgcttcgccatctatatgatctgcacgttcggcacttcgatctacgggcttgacctggcgtacatcgtcgtgggcaccgcgttggcgtacgcggtcgtcaccgcgatgctcgggcgtgtctccggaggccagttcaatcccgccatcaccgtggcggcgatactcaccggcaagaccaaggtagtcgccggcatcctgtacgtcatcgtgcaggtggtcggagcgatcgcggcggccggcgcggtcaagtggatcctgccgacctcgcagaccgtcaccatgaagacgtggctgacgcccgccgtcaacggctatggcaccggttccgtatcgagcgccaccaccagcagcgcatcggtgagcttcggcatctccatggccatcgtcgtcgaggtgatcgccgcgatcatcatcatcgcggtcgcgatgcgtcacaccgatgcgaacggcaagccgcatgcgacgtacgctccggtgatcggcgccgcatacggcctcggcgtggccatgacctatacggtcaccggtgccgcgctgaacccggcccgcgccaccggcatcgcgctgttcgggcagaatcagggtctttcaacacagccgctgcagcagctgtggatcttctggctggcgccggtcctggccgcggcgatcgtggcgctggtcatgatcatcgccgatatggcgtcgaaacgcaagccgaagacgcctgcggatgcgcccaacgacgaggcggcggacgctgaggcggatgcacatgacatcgccgtggacgcggcggtcaatgcggcgcccacggttccgtcaacgaatccagaacagtgacggtgcgaaatacaacagaagcagtcccagtcccaaaccgatgccgataatggcgtcgaacaggactgaccggactttccaagggctcttctcgcgcatgatgatgcgcagcagggccgtgacgatggccgtgacggcgatgatcaccgtcgcggccatcgtatatccgaggaaggcgacgaccagggcgacgatgacgacaccgagcacgcaccactcgaatgccggcttgccctcgtggacttcggacacatatggatgatgctgattcatggagcttcctcggggattggttatcgtgatggatcggccgcgaacccttgacggtcggcggccgatccgtgaatcggtgaccgggcggcggatcagtggaagaagtgacgggtgccggtcaggtacatcgtcacaccggccttcttggccgcctcgatgacctcctcgtcacggatggatccgccgggctgcacgatggcctttacaccggcgttcatcagcgtctcggcgccatctgcgaacgggaagaacgcgtcggacgcagcgaccgaaccggtggcgcgatcggcgccgtcggccagcgtgttggcacgatcgacggccagatggcaggagtccacgcggttgacctggcccataccgatgccgaccgtggcctggtcgtgcgcgagcaggatggcgttggacttgacgcagcggatggcgcgccaggcgaacacgaggtccttgagcgtggcctcatcggcgggttcgccggccacgagcttccatgcgtccggatcgtcgccggtggcattgatgaggtccatgtcctgcacgagcaggccgccgtcgatttggcggaactgcgtgtggcccttcggcggctcggccaccttgaggatgcgcaggttcttcttcttggtcttgagcagttcaagcgccgcgtcctcgtaggcgggggcgacgatgacctcggtgaagatcgggcgaacgctttcggccatctccaacgtgacggtggtgttgcaggcgatgacgccgccgtaggcgctcaccggatcgcaggcgtgggccttcttgtgggcctcggccgcggtggctccgatggcgaggccgcacgggttgttgtgcttgaccacggccacggcgatggcgggtgccatatcccacacggcgcgccatgcggcgtcggcgtccacgtagttgttgtagctcatcggcttgccgccgagctgttcggcgtgcgcgaagccgtcgcggtcgagcgggtcgaggtagagggcggcctgctggtgggagttctcgccgtagcgcagcgtgtgcgcgcggtcccaggtgcgggtgaacgcggccgggaacttcgccgcgttgaccgggttctcgccttcggccgggtcggcggattcgacggtggcgggcttgggccagtgcttggcggtccactcgttgatggtagcgtcataggcggcggtgtgggcgaacgccttgccggccagccagtggcgctcctccagactgaagccttcaccattggccacacgggccgcgacgagcgcatagtcggccgggtcggtgacgatggcgacggtggcgctgttcttcgccgcgccacgcaccatggacgggccgccgatgtcgatcttctcgatgaccgcggcctcgtcggcgccggaacgaaccgtatcggcgaacgggtacaagttgacgacgaccaggtcgaagggcttgatgccgaacttctcaagctgggcggcgtgatcggggttggtcatgtcggcgaggatgccggcgtggatgtgcgggtcgagcgtcttgacacggccgtcgaggcactccgggaatccggtgacctcgctcacctcggtgacggcgacgccgagttcggcgaggcgcttggcggtcgagccggtggacaccacttcggtgccggccttgatgaaggcctcggccagtacttcgatgccttccttatggaagacggacaccagagcccgtcgtatcggtcgattcgtgttggtcatcgtgctccttcttggttgttggttgtatggacttgcgggaaacgatggtacgcgggtgcgttgtcgcggctcgttgtgcccccgttcttcgtgcaatccagcgtatcccgaaaacaatggcgacgccaatcagcgccagcacccaggccatgcacagtcccatggcgctcggacgtccgacggcctgcgcggactgcatcacgtcgacgccgacgtatttgagcctggcctttcccagcgacccgttcgacaccccgaacatgaccgacgacagcagggatatgaccacgctcgacaggcagaacccgcccgccgggtaggcgagttcgagaatcaggtccttgcggtcgaggggatcggacgcgctgccgacgatgatgcggaaaccggatttcatcgccatggatgccagcccggcgacgaatccgacgaccagcggaatcagcacgacggcgaaccgtatgccttcatcgccgactgcctgcggaagcaggccgaaaacaggaagaggcggaagcgaacgcccctgcccgatccaaagggtgaatgtcgcaagctctccgatgtggaatccggcaccgaacagccacgagaccgcccatatgcacaggttgggcagccatgcaagcgatgcgatcgtcgtcagtatgcgcgagccggtccccatgccgatgtcggcgaacagcgtgtccatggccgaacggttcagcacgccccacacgatgacggtgatcagtcccatgaccaggtacacgcccatcatgatgacacccaccatcaggccggtcctgatcgtgcggcgcacgccgtcggacacatgatgacggataagttcacgcagctgcccagagaacgggcccttcgacagcgcggcgccggcgaatccaagcgagaacaccacggccgatttgacgcataccagagccggccagtcaagcaatccgacgggaagtgactgcgtgcccatgacgttgatgaaaatccagaccaccacgccgctgacgtatgcgcggatatccgtgcatatcttccggctgaacgaccagaccagacctatcagcagcacggtgagcagcagcggcatgatggacagggaaagcgagtcggtctcgaatccgatgccctggctgagcaggaccacgatgcgggtcatgtccaacgtcgaggacgacaggttttccccaccttcctccatcgagatgaccagcagcatgagcgcaagaaagcagcccagggcgatggcgtacaacgccatcgagccgatggcgatgatcggccccctgagccaggcctggatacgcttcctcataccagcgagcgttcggcgagcaccttgcgcatgaggtccgcggtctgaccgggagtgcgtccgacgggaataccggcggcttccagcgcgattttcttgtcctgcgcggttcccttgcctccggagacgatggcgccggcatggcccatctgcttgccttccggcgcggtgaatccggcgatgtatgcgacgacgggcttggtcatgtgctctgcggcccatgccgcggcgtcctgctccgcgctgcctccgatttcgccgatcatgaccactgccttcgtgtcggcatcctgctcgaattcctgcaaggcctccagcagcgtggtgccgacgatggggtcgccgccgacgcccaggcaggcggtgaagccgatgtcgctcagctcgcccatcagctggtaggtcagtgtgccggacttggagaccagtccgatgggaccacggcccacgatgccatcggggatgatgccgaggttgacgccatgctcgttctcctgcgacggcagggtgagcaggccggggcagttcggtccgatgatgcgcacgccacgctgaagggcgagttcgacgaagtaggcgctgtccgcaacgggaatgccttcggtgatgaccacgatgagcccgattccggcttcgacggactcgaccacggcgcctttggcgaaccgtggcggcacgaagaccacactggcctgggcgcccgtcgcctccttggcttcggcgcacgtggcgtacaccggaacggagacgtccctgccctcacgcgcggcctcgaacgtcacttggctgcccgccttgcgcgggttgacgccaccgacgatgttcgtaccggcacggagcatgcgggcggtgtgtgtcatgccctgatgcccggtcatgccttggacgatgacgggagcaccctcctggatgaatgcggtcattgcttggcctccttcgatgccttggcgttcgccgccagacgagcggcctcggctgcggcctgctccatggtgccttccacatgcaggttggggttgttcgccgcggcgaggatctgcaggccctcggctgcggcattgccgtcgaagcggaccacgagcggcttcgatgtgtgcagctcctcgaacgcctgcaggatgcccttggcgacctgctcgcatgaggtgatgccgccgtagacgttgatgaacacggattccacctgcgggtcggacagcacgatggacaggctgtcactcatcaccgcggcggacgcgccacctccgatgtcgaggaagttcgcaggcgtgacattcgtgccctgctccttgccggcgtcccagacggcgtcgagcgagctcatgaccaatccggcgccgttgccgatcacgccgacctgaccgtcgaggtgcacgtagtgcaacccgtgttcggctgccgccgcctcgaacggatcggcctgcatcggatcgtcgaagcgggtccacccgtcgtgccggaacgccgcattgccgtccaacgatatcttggcgtcgagggcgcacagtgatttggacgcctcatcgtcgggatcgccgatcttggcgagcgggttgatctccaccagcgtcgcgtcgttatccttgaagcactgccacatgcgcagcaggatgttggcggcctgatccaggtcggcgtggtagaagccgatctggccagccatgcgcttggcggcctccatgtcgaaatcgccgagggcgttgatgtgcagacgcttgaccgattccggatgttccttggcgatctcctcgacttcggtgccgccgttcgcggtggcgaggacatcgaagtcccgcgatgtgcggtccacggatatcgacacgtagtactcgtgcaggatgttcttcgcctcggcgacgagcacaccgttgaccttatggccgtggatggtcatcgggaggatggattcggacagcagtatcgcttcgtcccggttgtgggcgatcttgacgccgcccgcctggccgcgatggccgatcttgacctgggccttgatcacgcacgggtatccgatggtatcggccgcttcggcgacctcgtgggagttctgggcgaaaacggcccgcggcgtgggaatatgctgttcctccagcaattctcgtgcctggtattcataaagatccatgttcgacgcctcacgttcctatgatgtgttcttcgaatgatgattggtgccgtgcggcgcgtcccggcgcacggcaccgccgggtcacgccggcatcgacaccagtgtgctgctgggtttgtcgcccagtttgtccagtccgtcgagtcctcgcagccccatgacgaagctgaatccgacgaccgtgcccccggccgcctcgaccagatccatggccgccttcgccgttccgccggtcgcgatgagatcgtcgacgatcagcacccgatcgcccggacggatggccgacgtctcgatctccactttttcggtgccgtattcgagatcgtattcctcggcgatggtctccggcggcagcttgcccgccttgcggatcgcgatgaaccccttgccgagcatggccgcgagggcggggccaaacaggaaccctctggcctccagccctgccaccgcgtcgaacgagtcttcggtgacgggaaggctggcctggagcgccttcatgagaatgcgcagccccttgccatccgccagcaccggcatgaaatcacggaatttgatgccctctttggggaatcccggtatggtgcgaatcttcgagacgaggtatgccgcgtcaccggcaccgacatcggccagtctctcaatggtgatgtcagactgcgtcatggtctcgctctcccccgtcacttctcggcgtctgcggtctgcgcggaatcgtcggactgcgttgcgttctcagcggattccagcgccttgtccaccggtacctgggcctggtcgtcggcttcgtcggtctgctcggcgtcctccacttcgtcgtcatggatgaaggcgggacgcgtgtactccttgttgatggcgcggaaggtgaagcgcagcagggagccctcggagtcgatgacgatctcctcgtattcctcgtccacggacactaccttgccgatgatgccgccaatggtgattacctcggttccgggctcaagggaggagcggaagtccttcatcttttgctgctgctgcttggccttgcgggactgccaccacatcatgatgccgatcagcacgatggaaacgatcatgatgagataggatgatgaaccttgcggcatgatttctccttgcagtagggaacgaatgctctatggacgtcggtcaacaaacaaccaatgttagaagagcttgctgacatcctctccgtttgtttcaccttgtggctccagacccagatgagaccaggccttggccgtggcgacccggcctttgggagtgcggatcagaaatccttcacggaccagatacggctcgcatacggtttcgacggtctccgattcctcgccgaccatcgcggccaggttgttcaggccgacgggccctccgttgaagttgcgcacgatcgcgttgagcacggcgatgtccagccggtcgaggccctcggagtctatctgatagagcgcaagcgcggcgcgcacgtcatcgacgtccacgacttgcaggtcatgcacgatcgcccagtcacgcacacggcgcaacagcctgttcgcgattcgtggcgtgcctcgagaacgcagggcgagttccgcggcagccccctcccccaatgagactcccagaacgccggaggatcgctcgatcagcttttcgagctcatcgtgggggtagaagtcgagatgggccgtgaagccgaaacgcgcacgcaacggagaaggcaacatgccctcccgggtggttgcgcccaccacggtgaatctgggcagcgtcaacgggatggacgaggcgcctggccccttgcccaccatgacgtcgacgcggaaatcctccatggcgatgtacaacagttcctccgcggcgcgcggaagacggtggatctcgtcgatgaacagcacttcccctgcgtccagcgagctgagtatcgaagccaggtcgcccgcgtgctggattgccggaccggacgtgatgcgaatcggcacctccagctcgttggctacgatcatcgccaacgtggtcttgcccaatccgggagggccggcgagcaggatgtggtcgggggcggtgtcacgtttgcgggcggcgtccaggaacagctgcagctgggccttgagccgcggctgcccgacgaatccgtcaagggcatgaggccgcagttcctcgtcgctgatcgactcgtcgttgattgcggcggcggagaccatgcgtagggagtcctccgagacgccggtgttggtccgcccatcctgcatgtcgatgttggatgtcatggaatatcaccttcctctgtccagcgacgacaatgccagtttgagcacccgcggcacgtcctccgcactgatgggggtggctatggacgcggcatcgcatgcctgacgtacggcctcctccgcggtctggggacgccatcccagagagacgagtccttcgatcacctgcctggctccgggatcgcgactttccgacggcccatcggcttcgggccgtatctggtcgaggtcgatgcggcctgccagttcaaggatgatcttctgtgcgccttttttgcccaggcccggagccttggacaatgccgccgtgtcgccgtccgcgacggccttggccagacggtccggaggcagcgtcgacaacagggaaagcgcgaccttcggcccgatgccactgaccttctgcaattgcaggaacatgcgtttggacgcgggcgacaggaacccgaacagggtgacggcatcctgcgatatggtcagcgaagtgaagacatgcgtttcctgaccggcatgcaacgccgcaagatcggccgccgccatgcggacctcgtacccgacgccatgaacctcgatcacggcgctggatgcctccaccgactcgacgcgcccggttaacgtactgatcatcacgtcgtcctttcctcgccgaaccgcacgcggaatgggccgccacgagctcgttcgcctcgcatcgcataacgaaagcacatgccgaacgcgcccgccccgaactggcacgtcgtgcgggatatggtgtcgagacggcccatccacataatgcagaacatctgttcgatacacattacatgccgctgcggacgccggcgcgtcgggcggccttctgcgccgcctgcgcccactgccgttgagccgcggtcagatgctgttcccgttcgcctccctgcaaggcgccttgcgggcgcagggcatggcatatcgccagcgacagtgcgtcggcggcatcggcgggctgcggcaacgtgttcagccccagcaccttggccaccatgcgttcgatctgtatcttctcggccttgccgttgcccgtgatcgcgagcttcgcctcggtcggcgtgtgcagcgccacgggaatcccccgttgcgcggcggcgagcatggccattcctgcggcctgggcggtgcccagcacggtgttgcggttcgactgggcgaacacgcgctcgatcgacaccgcatcgggaatgaaccggtccattttggagcacagcccgttgtagatcgtcagcagtcggaggtcctgcgacgtatgggaatccgaacgcaccacatcgacgtggataaacgaaagccggcggttagcgccggcttcgatcacgccgaccccgcagcgtgtcagcccgggatcgacgccaaggatgatcacaggggattactcctcgtccgcgagctgggccatcacctcgtcggatgcggtccagttggcgtagatgttctgcacatcgtccaggtcatcgaggttgtcgatgagcttggagaccttctgggcgtcctcaaggctgagcgacacctcgttcttcgggcgcatgaccatatcggcggagtcgtagtcgaaaccagagtcctgcagagccttgcggattgtatgcagatcggagggatcggtgatcacggtgaacacgtcgccgtcgtcgatcacgtcttccgcaccggcgtcgccggccttctcgaacaggtcgtcgaagtcgacgccctcgctcggaacctcgatctggcccttacgctcgaagttgaagctgacggaaccgctggtggccagcgagccgttgcccttggtcagggtggaacggacttcggcggcggcgcggttgcggttgtcggtcaggcactcgatgatcaggccgacgccggcaggcgcgtagccctcgtacacgatgtcctcgtagttggcgccaccggcttcttcaccagagccgcgcttgacggcgcgcttgatgttgtcggccggcatggacgctttcttggccttgtagatggcgtcgtacagcgacgggttgccatccgggtcgccgccgcccatgcgggccgcgatctcgatgttcttgatgagcttggcgaagagcttgccgcgcttggcgtcaatggcggccttcttgtgcttggtagtcgcccacttggaatgccctgacataatgctcctacaggtatacggatactgacaaacgtcactatgataaagcggcaagacgacaacggcagtcctgggttctgccgctgccggtcattacgccgcaagaggaaccgcaggcaccgccgaaagtcccatctgatgacacagaaatgggactttcgcgggatgacggacgatgatggagctgcgcacgcctgccgggccggcaatacggcgaggcctccgccgtgaaatgtacggcggaggcctcgttcattggtcagaggttccgattcgaatcagcgacgctgacggcgaaccgcaagcatcacgatggcacctgccgcgcagatcatcgcggccagtgcggcgccagagacactggcaccggtctcggcgacgacatcaccgggctttccgccttcgggcttgatctggggcttgttgtcgccggacggcttctgcgggtccggattcggcttgggggtcggatcgggatcaggatcgaccgcgcccttgtcagtgacggtcatcgtgaacgaatccttgatcgaaccgtcatccttcagtgccacggtcacggtcaaatccccggcggcctcgaacggcttggtcacatcgattgcgttgccgtccttgtcggtcaccgcgatcgtgtaatctgcggctgcgagcacggcggtcgtcttgtcgctcttggtggcgaccaccttcaccttcgacggatcgaacgtatcaccgaccttcacgtcggactgcgaggtcgaggcctttatggagacgaccgtcacctccggttcgggatccggatcaggcgtcggacgctcgtcgccggtccaagtctgagtcaccttaccgtccttgatagcgatgctcatcgaggaatccgaagggatcgggtaggtggaggaggacacggagacgtcgagacggcctacggcctcgctgtcggccgcgagcacgtcggacggcaaggtgacgtacacgtcgacgatggagttcatgtgcgccccgttgacgacgagacgaccgttcttcagctgctgttggctgtaggtctgcttcatgtccggtgtcaccggcagattgaccgcggtaccgccctcggccgtgtacgtggcagtgaagctcaggccatcggtgccggtcaggccgggttcggcgtaccgtccgacaagcaccttgccgtcggtcaccttctgctcggccgcgtcgacagccgcgtacgagcccttccagctggtcacctcggtggccttgtggaagttggcgccacggttcatcaggtcgatggcgatgtcgccgacgcgcttgttccagttgtcgtaatccttgcggttctgctgggtccagccgacctcggcggtcgccatcatgcgggtgtacatcaggaattcggcgtcgttgagagaacgcaggtgctcgctccacagcgcatcctcgacgcccagaaccttgtcctcggtggtgccggcggatgaggtcgggttccactggtagaagttgctggtcgtgcaggcgccgcacgcccaggtcacgccagtggtctcggtgccgggacgctgcgggaagtaggtgttgccggccggcgacatgatgatcttgccgttgcgctggttgagcagcttctggatgctggcattgttggctgcgttgccggtccaatgctgcaccacggatccttcggggatctggtcaaccgcgtcgaggccgtcgttccacacgatggtggtcttgtcgcgttccttgaccagcgctccggaccgtccgagatactcctgtagacgttccgtcttgttaccggcgccgccgctgaggaacagctcatcgccgcccaggtggaagtacatgcgtttgagctcggacgcaggcatggtggacgccttgatgcccttgtcgatcatgccgtcgagctggtccatgatatgtcccagcacggtgtaggtgatgtcggcgtcagtcgcgaggctgctcctgccctgcgcagactggatgaaggcgggggtgtcctcgccggccgcaggcttcgggttggagttgccggtgttgagctcggcaaggccgtgcagcaggctgaaggaatgtccgggaccgtcgatctcgggcacgatggcgatgccgtgatcggcggcgtaggcgaccagttcgatgaactcgctctgcgtccagtagccggtgcgcccgtcctgtgccggggaccagttgctggtccacgcggactggtagctgatggcgccggacttgatcgcgagctgcgtgtagtcggtcgtatcgccatccgcacgcccgtcattggtgatctcgacgcggaagccctcgtcctcgctcaggtgcaggtgcagcgtgttcatcttgtaggccgacatcacgtcgatcatctgcttcatctcatcgagcgggtagaaggaacgcgccgggtcgaccagcacgccgcgccactggtaacgcggggcgtcggcgatgttgacggccgggatgaaagcgacatcggcaagcttcaccgtggagttcgtccacggaccgatcagctgcagcaacgtctgcgccgcccatatgcccgcggtggcgctgcgggccttgacggtgaccgagtcggcgtcggagacgatcgtgtaggcctcatcggcggtgatcgactgggcggaaccgacgtgaccggtgacgtccaggttctcgtcaagggtgaaggtgatcgggcagttcgtgccttcggcgagtttcaggccgtacgaggtgccgagctcgtcacgcatgacgtcaaccgcaggcaggaggctgccgtcgctcacggacacgcaggtgttcttcttaagttcaaacgcctctccgtcagcggattgcgcatatagcggcctcggggtgagccggctcaacgggtcggtggcgactgccgagatggtccccatcgtgcgcatctcccacacggaaagcgaccaggattggctcttcgtggtcgcgatcatgcggatgtgccgggttttgatcggcgtgtcgaatgtggttttgacccattgcgcctgtgccgtcgccttgagtcccgtcttcacatcggtccagttggagccgtcatcggaagtctggatggagtagttcgtcgcataggtgttgccccaggcgatgttcacactggaaatcgtcgcttcgccggggaattcgtaggccagccaccaggggccgctccccctgtcggcgctccagcgcgaggcgccggatgcgttgtgcacgcttttgtcggtggggttgtccggcagatcctggttgtcggcggccagttccggcccgaatccggaactgacttcgcgaccggacgcggtgaccgtcgccatggtcgcgaggttggacactgtggaagtggatgattccgccgctgccgccgcctctgcgttgtgctgcgccaaggccgatgaggccggcaccagcagcatcgccgatgcgcagatcagtgacatgaatcttgcgaggccacgtcgtttgatattcatgggatgatggctctttctctgtatctcctggcaggctcgctattgaaccacaccattatccggcctattgaatggaccgcgactttacaatccagcgtcaatatatcacgtcatcccatttttgtaaatatagtgcacaaaatgagcgagtcttgacatcacttatggaaagacccccgtcggcagcgaaacggttgctgacgggggtcttcaacgggcgcgaggggcccgtgcgtcaccttatgccaatgcggcggcgaagtcgtccgcggagttgacctgcgcgcgcttcttgatgacggcgagaatcttctcgcgcgcctcgtccaccggcacgccgttgagctggctgccgtcgcggaagcggaagctcaccgcgttgttgttcatgtcctcttcgccgacgatgaggatgaacggcaccttggacttggaggcgttgcggatcttcttcccgaagcggtcgtcggagtagtcgatctcgcagcggaccatctcgtcctccagcgacttgacgaaaccggccagatgcggcgcgaactcgtcggccaccggcacgccgagcacctgcacgggggcgagccatgccgggaacgcaccggcatagtgctccagcagcacggcgaagaagcgttcgatggagccgaacagggcacggtgaatcatcaccggacgctggtgggtgccgtccttcgcgatgtattcgagctggaaacgctcgggcaggttgaagtcgagctggatggtcgagacctgccaggtgcggccgatcgcgtcgcgggcctgcacggagatcttcgggccgtagaacgcggcgccgcccgggtcggccacgaggtcgaggtgggatgcctcggcgacctcgcgcagcgtgcgggtggcctcttcccagatctcgtcggaaccgacgtacttgtccggatccttggtggacagctcaaggtagaagtcagacaggccgaagtccttgagcaggttcagcacgaaggtcagcaggctggtcagctcgtccttcatctgctcgcgggtgcagtagatgtgggagtcgtcctgagtcaggccgcgcacgcgggtcaggccgtggacctcgccggacttctcgtaacggtacacggtgccgaactcgaacagacgcagcggcagctcgcggtaggagcgctggcgcgacttgaagatcagattgtgcatcgggcagttcatgggcttcaggtagtagtcggcgcccggcttggtgatgttgccgtcggcgtcgtactcctcgtccaggtgcatcggcgggtacatgccgtccttgtaccagtgcaggtggccggaggtctcgtacaggccgcccttggtgatgtgcggggtctgcacgaagctgtagtggtgcttacggtgcatctcacgcgagtagtcctccatcgcgttgatcaccgcggcgcccttggggtggaacacggccagaccgggtccgatctcctccgggaaggagaacaggtccatctcggcgccgagcttgcggtggtcgcgcttggcagcctcctccagacgggtctggtaggccttgaggtcctccttggtggcccacgcggtgccgtagatgcgctgcatggtggggttcttctcggatccgcgccagtaggcggcggcggaacgctcgatcttgaacgccttgatgaagcgggtgttcggcaggtgcggtccgcggcacaggtccttccagacggtgttgccgtcacggtcgacgttgtcgtagaagctcagctccttgccggagacctcggtggcggtggacgggtcgagatgcgcttccttgtcctcgatcagctcgatcttgaacggctggtcggcctcctccttgagggcctcctcctcggtgaccacacggcggcggaaggactgggcggacttgacgatgcgctgcatgtgcttttcgatcgccttcaggtcgtccggagtgaagggttcgtcgacctggaagtcgtagtagaagccgtccttgatgatcgggccgacgcccagcttcacgttcgggaacagctcctggaccgcctgggccatgacatgcgtggcggagtggcgcatgatgccgaggccgtcttcggaatcgatcgagacgggttcgacctcgtcgccgtcgctgagcggcgtgcacaggtcgcgcagttcgccgttgaggcggacggcaatgatgtccttgtcgtccgcgaagagctcgacgccggtggtggttgcttccacctccttcgcctcgccgttgactgtgatggagatggagcttagcgccatgatgtgtcctttgctatcggggcccgcgttaccaatgtgcaggcctggactggtaatcaacagtggcaacgataggaacccgcgcagacaatgcctcgttcatgctccgcggccggggccgccggacatgcgaacggggccgccgccgcggttcccgatcatggggagaaccatggcgacggccccggcaacgtaccttggaggcggagtatcagtccttctttctggaaggcttgatgccgcattgttcctcaccggtgccctccagcgcggaggctggagagaagttcagcaggttggcggaggaggcgcccttcacggcaccgagaccggcgggcttgcctgccgccggcgcttcgacgggtgccttggcttccggttgcgcggccgcgacggcgtcctcgtcctcgctggcgtcctcatcctcgaactccttgcgtccatagtagaggtccttgtcgaggtccttctcggtggcggccacgatcaccgccgtgttggcggcaccggccacgttgagagcggtgcggcccatatcgacgatctgcgagatcggctggctgatcgcgatgaacgggatcggcagaccggccgccgcgaacagcgaggtcgcggtgatcgtcgcggtgccgggcacgcccactgtgccgatggacacaagcagggcgagcaccaccaggaacaggaactgggcgggcgagtacgaaattccctgggcgttcactgcgaacacagcgagcaacacgggccacacgccggcgcatccaggcatgccgaggttcgcgccaagactggcaacgaaggacgcgatatcgccgggcacgccgctggagcgcaggttgcgcacggtcacgggaatcgtgccgatgctgctttcggaggtgaacgccaccacgccggtgggccagtacgccttgaagaacggaatcgggctcaggcgcgtcgtgacggacaggatgagcggctgcacgatgaacagctgcaggatcatcgcgacgtacgcgaccacgagcacggtgaccagcggtagcagtgccgccacatcactgttgctcacagcggcggcgatcagcgcgagcaccgcgtacggagtgaatccgacaacgatctgcgtggccttggacagcactacgttgccggcatccacgaacgccttgaacggtttgacggccgcggcgcccttggcggtcttggcggcggagttgtaggcgacggccacgaggatcgcgaagatcaccacgggcacgacctggttggaataccagttctggacgaggttcgtcgggaacagcgccacaatcgtgtcgagcacagcgggcacctcgcgctgctggtagtcggtgggcagcgtgaacttgaagccctcgcccacgcggaacagcagggccaatcccagcgtgatcagcgcggcggtaaacgtattgatgagcaggaacaccacggtcttgataccgatgttcctcagtttgagcgattctcccagattggtgatcgccgcgatcacgctgaacagcagcaacggcaccacaatagccgcgatcgcgttcgaccatacgctgccgaacgccgccacatagtcggtatgccccttgaacgcgatgccgaccacaatgcccagtacggtcgcgatcagcacgcggacgctgaatcccgctttcttcctgatactcagataagccaaacccgcaaacagcacaacagtggcgcccagcgccacccaattccatgccgtatcggacatgtcatctcctttcgtgtcatgacgacgcgacgcctgatacaggtgcggcaccgctcttgattccatcgattcaccgtacagtagcggacgaaacaacatttcggaagtgctatcggttttttcgataagggcttaacagcaccgcttcaaaattgggaaggactgcggcaattacctaaatgactgaagctcttacgccggtaggtgaaacgcgaagcgagtagcggggtattgtacgggcgctgaaaacaccgtatccgaagccccatagaccagagcggattgatggagcggacaacgggactcgaacccgcggtctcaaccttggcaaggttgcgctttaccaactaagctatgtccgcagtataccgatacaagaccagcatcgtgggtgatgtaggaatcgaacctacgaccccttccgtgtgaaggaagtgcgctagccgctgcgccaatcacccgcaaacaacaaatgttcattttacgtgacatcatcggcgagcgcaaccattacggcgagtcgccatgcaggccgcggctacgacgaaagcacatgacttgaataacgcagaccgacacgcgataatcgacgcaacgggggcaaaggagacatcatgaccgaacagcagccgcaggaaccctatggcgacccgcaatacgagtcatacagggaaggcacgccgaccgagccgtcgccggtcgtaccgtcatcggtgatgccgacatcgcccataccggcatcatccatatcccagccgaccgagtcaatgccgaccgagtcgatacccaccacaggcgcgtcgggcccgacaggagcatcacggcagcgccaggcaccacaaccgcacaccccatacggattctcttcagccacgcggcctcccacatccgggccgtatgcgcccggccctttcccgactcctgaagcccgtgcgacacagggctcatacgaagcgcccgccccatggtccaggacgctcaacggcgcatcatcgtcggcatcatccccgttcaccacgggccaaacaaatcgtcaggcccatcccccgtaccagccgtacccgatgccgccataccagcagtaccgcccgatgcagccccccccgaggaaaacgggcatcggggcgggcggcatcacggcgatagtcgccgccgtaatcgtcatacccgcgctgctgttcatcgccgtgaccgccgggctcatgacggtggcgaagaaccatatcagccaaggcgccaacgagccgaccaacagctacggcaacgcgtctccctccgacccgaatcaggccgaccccgagccgacctccaccgtctaccgcatggacgagcggcccggatacgagagcatggtgacctacgtgaccgacaaactcgaccattacaaggacgagatactcaacaacaacaccatgttcatgagcgaataccggatacccgacacgcaggacggcaccgactacatgacgggatacatggcggcgttgctgggcaccgtgaacgaggccaaggcggcagcgaacgagaccagcgaggaccccgatgcgctggatgcgaagatcgactcgtaccgaaccaccgtcgacacccttgaagcacggttcaagaagggcaggcgctcggcgtttcgatgaccgttaccggcaacgatggcaagaagtacacggtcgacggcagcaaatcaatcacgctcaggcctacctgggacgagctggaacagcgcgtcgccaaagcctcgaactcgctggagagtggcaacgccgccagcgcgcagaaactggtggagctcgcggacatgaagctcagctgggacatcgacgagggattcagacagttcccggcgtttgcgggtaccgacgacggcgacaacaaggcgctgacgaagtccgagacgttcggcttctactgccctgccacgccgaacgtgatctacggcaaccgcagcatgcccgactggaacatgacctacgcgacggccgcgggcgtgaggcacgagctgtcccaccacgccatccacatgcgctgcggcaccatcgagcccgaggccgtcatgcagaacggcgtgaaccgcaccgaaggcgtgacgaacagctacgcggtcaagtacatgggcgcgaaccgcgccctgatccagcagagcatcgattacgcggccagcaccgggcacaagcagtatcgcatggatgcgttcaccgaccgggccgcggaacgcatccactccgggcaatgcaacgcgggatgagcaatcgggcggggttctgaagtctaattgcgtttcgagggggtgcttcaggctcgttcggacatctatctgcgtttcgaggggttggtgcccgagtagagccgggccggaaaccgcatgattccaatgcgggatgtccccgcatactccggatatcgcgtttgggcaaccccttgaaacgcagatagatgttccgagagcgcgaaatcaacccctcgaagcggagataccgggtatcagcctgccagcggaggcaatgaggcacggtaaaacgggttataggccaaaaaacacccgaaggcgctacatataagaggaacatggtgggcgatacaagattcgaacttgtgaccccttccgtgtcagggaagtgcgctacctctgcgccaaccgcccgggtctgtatcatttgacggaaaccattatgtttcggattccatgcaaacgagaggtgggtacgagagtcgaactcgtctatacggctttgcaggccgctgcctaaccgcttggctaacccaccgcaaaggtcgtcaactcttcggaccttagagcggacaacgggactcgaacccgcggtctcaaccttggcaaggttgcgctttaccaactaagctatgtccgcgtttccttgaccagcgtcatgccgttcaagcaacggattacaactataatgacaaccatgggatttgccaaatccggcgtgtcgcgcgatgtcacggcctgcgaccgatcacccacaggccttgccataccgcgattctctgatggcataagccgcctgcaccagccgcgaggaaccgttacattggttgatatgagtgaagaagcgaaagcgcatgaaccggtgatgatcgccgcattcgaaggctggaacgacgcatgccaggcagccaccaacgtcatccggcatctcgtgtcgcgctacgattcacgcgagatccgccacatccgctgcgatgggtactacgactaccaggtcgcgcgcccgatgctgtgcaaggtgacgggccgacgccggatcctatggccgcagacgacattctacgccatcgacgtggcgccctcgacgaccctgtatgcgcagatcgcgcccgagcccaactaccgttggaacgactactgccgtcaaagcatgcgcatcgccgaggagcttgacgtccgccatatcgtgaccatgggcgccatgttcgccgactgcccgcacacgcgcgcgctgccgctcgacatcagcgaccagcagtgtcagtgcgacatggaccgggaatacagcggccctgtcggcatcccgaccgtgctggattgcatggcatgcgaggagggattctcgaccacgtcgatgtgggtgtccgtcccgcaatacctcggcagcgacgaatgcgcgcaggccaccatgcagatgctcgcggcattgtccgaccgcatcggcgtcgagctggatccgggcgacctcgccggcaaggccgaacagtggaaggcgcaggcttcggtgctgacgcgctgcaacgacgacctcgcccaatacgtgaaacaccttgagcatgattacgacatgcaggagaaagccgatcaggtggcgcgcttcggcgctccggccgcggaacagctggtgcgcgaggcagaggccttcctgcgcagtcgcggcaagtgacgcgggccgcataatctcacgtcaacgcaaatggcgtccgttccgcgaagccgcgaaccggacgccatccaagcgtgtttcgtgacgttacggcgatgaccgcaacgtcaccctgccgccgtcatctgaccgcggctgcggattgctccacggtgacgatgctgaccggattgacgacgctggcctcgctggcggccttcaccggctcatacggcttcagggcgccgaacagcagcagcagcgcgacgatcaccgacaggccgatgcgatagatggagaacgccttgtacgagaacgtggagacgaacttcaggaacccgatgatgacgatgtagccgagcaggaagctgatgatcatcgcgatgatggtcggaatccagccggggaacatgcgatcggtcccggcgctcttcacggccttgaccgcttcgagcaggccggagccgaacaccgcggggatggccatgaggaagctcaggcgcacggccgattcgcgcgtgtatcccagcgcacggccgacggtgatggtgccgccggagcgggacacgccggggatgagcgccatcgactggccgaggccgaacaggaaggcgtcgcgatagttcatgtcgtccatggtcttgatctgccgggagcgggcgtccacgatccacagcagcagaccgaacaggaacagcacggtaacggtgatccacaggttgcgcagcgacgtctcgatgatgttctgcagcgtgaagccgaggatgatgatcggaatcgagccgacgatgacgttccatccgagcgtcgcgtacttgtcgccgcgacccatgcgcgcacgccagtccgggccgttcttgccgaacaggcatccgaaccagtgcgacaggatgttgatgatgtcacgacggaaatacaggatcaccgcgagctcggtgccgatctggatgatggcggtgaacgccgcgccgggatccgcgcccagcatcagatctccgatgatgcggatatgcgcgctggacgacaccggaagatactcggtgagcgcctgcacgattcccagaatgatcgcttggaagaaattcatgatccctcttgaatgattgtccgtcctttaccgtggacaagggtactcaacgtcccctaagaacgtgccaaacatcgtattgtcgtacagaaaacccacaatgaggggtggtggatagtcgggacgtcacggggaggaattatggcacgataccgcaagtcaaggatgtgggcgccgcagggctttttcgagtgcgagggccgcggtctgcaatggctcggcgaggcgcaggcgcagggcggcccccgcgtggtggacgtctacgaatggggcaaggattttctcgacatcgaacgcgtatccccctgctcccccacggccaaggcggcccacgatttcggcgcggccctggcgcggatgcatgacgcggggacggaccacttcggctcggctccggccggatatgacggcacctgctatttcgggccgctgcaggatccggtgccgatggcgaccggcgcgtgggatgacccgatcacctatttcgcgcaggggcggctggtcccgatggtcgaactgggcatgcgtcacggagagctgacccaggccgacatggacctgacgaaccgcgtcatcgacgcgatgcccgaccttctggggcgtgcggcgcaggacaagccggcgcgagtgcacggtgacctgtggagcggcaacgtgatgtgggccgacgaccgaggctcgtgcgaggccgtgctgatcgatccggccgcacacggcggtcaccgcgaggaggatctcgcgatgctgcacctgttcggcatgagctatctgaccgagatcatggacggttaccagagcgtgcatccgctgaaggccggatggcaggagcgcacgacgctgtggcaactgtatccgatcgccgggcactgcgtgttcttcggcggcgggtacatcagcgaataccgttccatgtgccgctcgctgctcaagtagcaggagcccgcaacaagaggcatatgtacgggaaagggctttcagaccagagtgtctgaaagcccttttcaatgccgaagccgctgatcggcgcgaatgacgagcgctgccgagcatggacgggcatagccgaattcagctcagcgcgtccttcaacttgctgaaaaaccccttgcgctggctgccggtggcggggcgcgagctctgcgcgacgtgcgacgccgaggcgtcgtggctggccgcgaactgctcgatgagcgaacgctccgagtcggtcagcttggtcgggatgtgcacgttgacatgggcgacgagatcgccgcgctcgccggattggcgcagcttggtgacgcccaggttcttcaggacaatcgtctcctcgggctggcatccggccggcacggtcaccttctgcttgccgtcgaaggtgtcgatctccatgtcgtgacccaatgcggcccagctcatcggcacctgaatccagcaatgcaggtcgtcgccgctgcgggtgaagcgcttgtcggccttgatgcgcacgtcgacgtacaagtcgccggccgcgccgccgccttcaccgacctcgccctgatgggcgaggcgtatgcgcgattcgtccgcgatgccagcgggaaccgagatccccacctcgcgcgatgtccgtacgcggccgtgccccatgcaggacgggcaggggtcggagatcaccgttccgtgcccctcgcaccgctcgcagggcgcggaggtcatcatctggccgagcatcgtgcgcacgaccttctgccggaacccctggccgtggcagtccgggcaggtggtgggctgagaaccgttggcggtgcccgagcccccgcactgctggcacagaccgaaagtattgatcttgatgtgcgtggtgccgccgaagaccgccgtcttgagatcgatggtggcgctcgccagcgcgtcgcggcccggctgggtgcggggaacggggccctgcgagccgccgctgaacgctcctccgaagaactggccgaagatgtcggacatgtcacccatgccgaatcccgatgcgccgccgaatccgcccgcattggggtcgttggggtccacgccggaatcgtacatgcggcgcttgtcggggtcggagagcaccgcgtaggcgttgttcacttccttgaacttgtcttcgtattcggggccggcgatatcgggatgatacttgcggctcatcttgcgatacgcttttttgatctcatcgtcgctggccgacttgtcgacgcccagcacctcgtagtaatctgccactgctcgttctttcttgttggtgttcggggagctattgtgccataaggctcagtcagttgccgtcgccgtcatcgtacgacgatatcgcacgggtcaggtaccgggccacggcacgtacggcggctatggtcgcggcatagtccatgtgcgtcggtccgatggagccgacgaaggccaccggcccgctggattcgcccgatccgcccgacccgccgtcgagagatggcatcgtgacgctatcgccatcgtccattttgccgggctccgcgtcggcgtcatccgttatgcggggctcccccgccatgccgttctgagccgtattggcatgcgtcgcgccgccaagcgcggatccaccgccgtcttcatgtcccgcgtccgattccgccggttccgtccgggatgccggcgagtttccgtagccgctggtgaccaccgaagcatgcagcagttccggcgtgtgcgtctccgaaccgatggctacaccgaccccataggcgtcggtgtcctccgaaagcgcgctcatgagtttcatcagcacgatctgctcctccagcgcgtcgaacagcggcgccatgtcggcgatgtcacgccgatgggccaggtgcgacgcgccggccatatacagttcactggacctttcgttgtctcccatcgcctcgaacacctgtgccagcccttcaagcagcgcaacggattcccgccgcgacgacttgagggaacggacccgttcggcagcctgcgcgaaggtgagcccgaggcaggctccgttcacgacggatcccacgtcggcgagcgtgatatccgtcggctggggcgacagggcgagcgtatgctgtgcgacgttgccggcgtcggtgatgaccacgatcagcagcaacgtggatgagacggggacgatctgcacgcgcagcaccttcgccttggccggggacggggaggcgaccacggccacctgaccggttatgtgggaaagcagtctggccgcgcgctgcaacgtgtcctgcaggctgacggatccggacaggaacgccgcgattcccttgcgctgcgcgtcggagagggggacgacggtggacaggcggtccacgaagtaccggtagcccttctccgtcgggatgcggcccgaggacgtgtggggctggatgagatacccctcttcctcgagggacgccatgtcgttgcggatggtcgccgagctgacgccgaggtcgtgcttcttcgtcagagcggccgatcctatcggctcctgggatcgaatgtaatcctccacgatggcgcgaagcaccaccatgcgtcgtggttgcgccatgtctcctcctgtccttccccggcattcacgccttcacggctttcccgtattcacgacacgcccgacactcccggagtggggtcggtcgaacgatgacgtacccagtattagcactctttgcccttgagtgctaacgcgttcgttatcagatgatttcatgacgcagccgccggcatgagtcagtcacaagttgtgagcgctaacataacaaaatctaccaaaacacgccaaaatcgaaccattaagtctgttcacaacgttagtatgggattgcaatgtgagggcatgcatggcgcggcataagccgaaatgcgtggtgcccgaagtattggaaggaaagtacatccatgaccgaattcaaggagaccgagctggacgagcgcgccatcaacatggccaaggtcctgtcggccgacgcggttgagaaggctggaagcggccaccccggttcccccgtctccctggcgcccgtcgcctacaccctctaccagcatttcatcaagcatgatccgaacgaccccaactgggaaggccgcgatcgcttcatcctttctggtggccacgcttcgctcacccagtacgtccagctgtacttctccggctacggcgtcactctggacgacctcaagcacttccgcggcggcgcggacacccgcaccccgggccaccccgagtacggtctgaccccaggcatcgaaatgaccaccggcccgctgggccagggctttgcctccgccatcggcttcgcctacggcgaacgcttccagcgcggcctgctcgacccggagaccccgaaggaagagtccccgttctaccacaagatctgggccatctgcggtgaaggcgacatcgaggaaggtatctccggcgaagccgccgctcttgccgccaaccagaagctcggcaacatcaccgtaatcttcgatgccaaccgcatccagatcgaaggcgacaccaacctggtgctggccgaggacgtgctcaagcgcttccaggcctacggctggtacaccgacgaattcagcttcatccagcccgacggctcctacaaggaggacatcgagggtctggccgaggtcatcgccaaggccgagaaggccgcgcctgaccagccgaagctcatcaaggtccactccctgatcgcatggccgaccccgggcaagaccaacgacccgtcctcccatggctccaagctgggcgccgaagccgtcgccggcctcaagaagctgctcggctacgaccccgaagagtccttccacgttgacgaggaagccctcgcccacgcccgcaaggtcgcagagcgcggtctggaagcccacaaggaatgggacgagaagttcgacgcctggcgcaaggccaacccggacaaggccgccctgtacgaccgtctgaaggccggcgagctgccggaaggcttcgacaaggccctcgacgatcttgaggccaccttcgaggtcggcaagaaggtcgccacccgtggcgcctccggctccgtcctcaacgccatcgcggccgtcatgccggaactgtggggcggctccgccgacctcggcggctccaacaagaccgacctcaagggcgccgccaccttcgctcctgcggagtgcgccaccaagcagtggccggtctgcaacgagttcggacgtcagctgcacttcggcgtgcgcgagttcacgatgggctgcatcaccaacggcatcctgctgggctcccacacccgtccgttcggcggcaccttcttcatgttctccgactacgagcgctccgccgtccgtctggccgccctcatggagatcccgaacctgtacgtgtggacgcacgactccgtcgccgtcggtgaggacggcccgacccaccagccggtcgagcaccttgcctccttccgcgccatcccgcagcttgaggtcatccgcccggctgacgccttcgagaccgccgaggcctaccgctacttcttcgagaagaagaacacgctgcccggcgccatggtgctgacccgtcagggcgtcccggtgctcgccgagaccgccgccaaggccaaggacggcgtgcgcaagggcgcttacgtcctggtcgacaccgagggcaccccggacgtcatcctcatggcttccggttccgaggtccagtgggccgtcgacgccgcgaagaccctggccggtgagggcgtcaaggctcgcgtcgtgtccgtgccgtccatggaatggttcgaggagcaggacgccgagtacaaggaagccgtgcttcccgcttccgtcaaggcccgcgtgtccgtcgaggccggcgtggcgatgccgtggtacaagtacctcggctcctacggcaagcccgtctccatcgagcagttcggtctgcagggcgatggcgcgcagaacatgatcgacctcggcatcaccgccgagcacgtggtcgaggccgccaaggcgtccatcgcggaagccgaagccgccaagtgatccatcgggaaccgcccgccgaggcgaatacgcggcgggcggttccctcccggtcggcacggccgacaagcccctcgcgggaggggcgccattgaagatttgttccattacggaatcaaaggagaaaacaatatgactgaagcaactcagcgcacgtccgacaacggcgtctcgatctggctggacgacctgtcccgcacccgtatcgagtccggctccctgcaggagctcatcaaggacaagaacgtcgtcggtgtgaccaccaacccgtccatcttccagaaggccctgagccaggtcggcccgtacgacgcccagctcaaggaactcggcaaggtcgacgtcgagaccgccgtgcgcgagctcaccaccaccgatgtgcgcaacgccaccgacatcttccgcgagatcgccgaggccaccgacttcgtcgacggacgtgtctccatcgaggtcgacccgcgtctggcccacgacaccgagaacaccgagaagcaggccgtcgagctgtgggagaaggtcaaccgcccgaacgcgatgatcaagatcccggcgaccctggaaggcctgccggccatcaccgccaccctcgccaagggcatctccgtcaacgtcaccctgatcttctcgctggagcgctacgagcaggtcatcgacgcctacatcgagggcatcgcccaggctgccgccaacggccacgacctgaagcacatcggctccgtcgcctccttcttcgtctcccgcgtggacaccgcggtcgacaagctgcttgaagccaacggctccgatgaggccaaggcccttgagggcaaggccgctgtcgccaacgcccgcctcgcctacgagctctttgagaagaagttcgccgccgatcctcgctgggctgacctggccgccaagggcgccaaggtccagcgtccgctgtgggcctccaccggcaccaagaacgccgcctactccgactgcaagtacgtcgacgagctcgttgccaagcacatcgtcaacacgatgcccgagaagaccctgaacgctctggccgatcacggcaacggcgctccgtccatcgagggcacctacgaggagtcccacgccgtcatcgacaagctggccgagctgggcatcaacctcaaggacgtcaccgacaagctggaggccgacggtgtcgccgccttcatcaagtcctgggattccgtgctggccgacgtgcagtccggcatcgaccgcgtgaacgcctgagaccgaccggtcaagcgtgacatacgcctgaccacataatcgtgagaagcccccgacccgataacggccgagggcttttcacgtgatacactgcttgaccgcacacgaacgccatgtcaaaaccgggaaaggccgtgaatgacgccccttcatgtatcatgccgaaggggatttctctcgccgcgaacatgcgccagcgcatcactcaagcagaaactacaaacagaaggatcgtcaaccacatgaacttgcatctggcagaggcaggacgcacgctgattccccgcaaggatgacgaatacggactgctctcccccgccatggtgctgatgacgttcatcgccggtctggtcgatgcactgagctacctggccttgggacatgtgttcgtggcgaacgtcaccggcaacatcgtcttccttggcttcgcgctcgcccacgcacaggggttcgtctggtggacatcggcgctgacattggtgtgcttcgccttcggcgcgttcatcggaggccgcatcatacgccggttcggagaacaccgggcccgccatctgctgatctcgtcgatcgtgcaggccgcgttcatcctcgccgcgctgatcggactgtacctgctgaaccactattccgcggaaccggctctgggcatgggcagtatgcgggcgtcatcgcagccgagcctcaacttccccaccgcccgccacatcgacgtccatcatctgatgctgatcgtgctgatcgcccccgcgatgggcatccagaactccactgcccggcggctcgcggtgcccgacctgccgacgaccgtgctgacgatgaccgtgaccggcatcgtcgccgacacatccgcccacggccatgagatgtcaaaactcggccggcgcgccgtcgccgtattggccatgtttctcggagcgctgacgggcgcggcgctacagtcgaaaggacatgaggacatcatcctcatggtcgccctggcttgtctgctggccgtgatcggcatgatgctcgcgcacgcgcattccacggcggcatgggcgaccgcccgccactgacctattccccaacgcacagcaatgtgttaaactgcgctgccatgggcttatcacgggtcgggccacctgacgcgggtggattcatgccgaccgccgggaaccgagtccgaaacaggtgccgagaagacaggcgccaagccgccgcaacagaaagcagtaccgttatggcaacgactcccataccaacagacatcaacaccgccgcatccggcggtcggcgccgtctcccgttctccggacgcctcgtcatggcgttcacgttcttctcgatgttctttggtgcgggcaacctcatctttcccccgttcgttggggcgcaggcgggcgctgccaccgttcccgccatcatcgggttcatcgtctcggcggtcggccttccgattctcggcgtgctcgccgtcacgttcgcgggtggcttcgacgagctcgcccgccgtgtgtccccggcgttcgcctcgctgcttggcgtggcgatcatgctcaccatcggcccgtgcttcgccatcccacgcacggcgaccacgtcatacgagatgatggtggcgccattcctgccctcccgcactggatggggcggctggacgacgcagctggcgtactcactggtgttcttcgccgtggctttcctgctggcccagcatcccgagaaactgtcggccgtgttgggacggttcatggggccgctgctgttggcgttcatcgcagtgctgttcatagcctgcctggcgcatggtgcggtaacaccaacgcaaccgacaggcgattatgcggtgcatcaggcgtcccggggcttcctggacggctatcaaaccatggatctgctagctgctttgtacttcggcatcgtgatttcggcgaacgtccgcgccatgcatgtcaccgacaacacgcttattcgtcgggagaccgcgtacgccggtctcggcaccgggatcctgctgatcgtgatctatgcggtgctcggctatgtgggtgtcgtgtccgggagcattgcctcggtcaatccagcgaccgatacaggcgcgaccgtactcaccaatctcacggcctcgttgttcggcacgttcggcatggtatttttgggcatcgtgttcgtcatcgcctgtctgaatgtctgcacgggtctgatctgcacgtgcgccacatacttccgcacgcgattcgccaccgtcgccggtcgccgcgtgagctatcgcgcatggcaggcactgttcaccgtgttcagtttcgtggtgtccaacgccggactcagcatgatcatcaaggtgtccgtgcccgtgctcgccgcattgtatccgattgccatcgtgttggtgacgctcgcattgacccatcgaatcctcgccgttcatttcccgcgcgtgtacttctggatggtactgctggtggccatcgtgtcattcgccacatgtctggcgagcatcgtcacggtattcggcggctccctgccatggctagaggccatattgaacatgctgccgctgcagcaatttcaactgggatggatcattccggcgctggcaggcttgctcatcggcgtgcttgacagtgctgcacattcgtcgttcaaacgatgaccgactgattcgagggctatcttcgtttcgaggggttgattgaggctcgctcagacatctaactgcgtttcgaggggttggtgcccgagtataaacaccatgggaatcgcatgattccaatgctgaacaccccgatatactccgggtaccgcattcaggcaaccccttgaaacgcagatagatgttccgggacgccggaatcaacccctcgaaatcgagataggagatggaacgggctaatgaggcgcgtaggacgactggggtggtcatcacaaactacgctacggcgtccgacactccttgaaggccgtgtcatcgtatcgccggataccttgggtcagattagagagctggtaggttccatcgtccgttttggcgagcaggacaatgatcttggtctccgcaccatatttcgcgatgaaatcgtccttggcgcccgctccttcgcatccaagattgacggtgaccgtgatatcactaccttccacagaccccttgagacgcgtccagatttcagcgtcatgtcatacagatcctgttggtcgccatcggcttgcttcatcctgtcaatcgtggcaacggtgactacatccgatgcagcgacggcatcgctgagattgccgtactgcacgccggcgccacaggccacggaaacgacccgaccgccgcatccggcaaaaaccagtatcatggctaagaccgccagtattgccggaacccgcatcctcgtctgatgatatgaacgcatcgtcatcatgtctccttcgacatcaagccggcgctcgcccggtccgggcgctcccgcctccttcccatgacaccattgcacgaacatgccccccaatgagcattggcagccggcaatacggcgggcgccgccttcaccggttcttggcatcatccgcgatcctgccccgtgtcagcgaacggtaggtgacgtagaacaggatgcccgcgacgatgccggaagtcgcgtcggagatcggctcggcgaggaagatgccggtcactccgatccagtgaggcagtgtcagggcgagcggcaccagcatgatgatcttgcggaagatcgccaggaacacggactgcttggcctgccccatgccgacgagggcgcactgcgcgcccatctggatgccgaacacgccccatccggcgacgaagaccggcatcatgcgggtcacgatgccgatgacttccggcgacgacgtgaaccatgcggcgaacacgcttgggaatgcggcaagaagcgacaccagcaccgtggccgaagtgatctgcgcgatgaatgccacgcggatggcctgccgcacgcgatccatgcgccgggcaccgaagttgaacccgatgatcggctggatgccctgctggaaaccgttggtcagcacactgaccacctgcatgagcgaggtgatgatggtcatcgacgtgacatagtcgtcaccgccgtatcgttgcagcccgacgttgaacaccacgttgatgaggcattcggtgatctgcatgatgaacggcgccaacccgagggtcaggatcggcacgattactcgattgaagcggatgttggacggtctcaaccggatggcgctgcgcccggaggcgaggaacaggatgatccacaccgatgagatcaactgggcgatcacgttcgcgacggccgcgccctttacgccccagccgagcacgaagatgaacaccgggtcgaggatgatgctggtgccggtgccgatcagcaccgaggtcatcgcgacggtggtcttgccctgcgcggagatgaagttgttgagtccgagtgtgagctgcacgaacactgtgccgaccaggtagatggtgatgaagtcgaccgcatatccgatgttggcgtcgctggctccgaaagcgcgcagcaccggctccttcgtcgcctgcaggatgacggtgagcgtcagggcgatggccacgaggaacgccgcgctggtgcccaggatgcgttcggccttcttgaaattgccgcgacccagttcgatggacgccctcggcgcgccgcccgcgccgatcagcgacgcgaacgcggtgacggccagcaggatcgggaagcagatgccgacgccggtcatcgcggcatcgccgacctcggggatatgcccgatgaacagtcggtcgatgatggtgtatgaggcgttcgccgcctgcgcgacgatggtcggaaccgacatcgtcagggcgagccgcgcgaccggtttcgtgccgagcccggagctgtccgccgtcatgccagcagatgccgttcgatccattgcgcgacgccgtcatcgttgttgggcgggcagatctcgtcggcgatcttgatgacctcggggttcgcgttggcgaccgccactcccgtttccgatgtcgtcatcatgccgatgtcgataaggtcatcgccgaaactgacggtaccgtcgagccgcacgtccatgcgttcgcacagcgtcttcaacgcctgccgcttgttcgccagcggattcatcagcatccacatcgagccttcggagatcgccacgtcgaaatcgggcggaaccagcgtcttcagatgtgcccattgctccgacttggggaagataatgatcttgtcggcgataccgtcggggacgtcggtgaaatcggtgaattgccaagtctgtgtcttccagtacacgctcacgtcgaagttcgtgtagcgcacgtcatccatgacgatgccgaggctgaggccgggtatctcgtcgagcagataccggcacacctcgcaggcccgtgcggaggagaagccgaccttcagcagatgcccgtcggaggggagccgccccgaggtgagcagatcgtaatcggaacgttcgggcgcgaaatcaatcagggcaccgttgagataaatgtacgcgtcgaccggcaacttacccgcgtactcgaagccggtgctcaccggccgggcggtcgccaccgcgaaccggtaaccggcatcgtgcatgcgtttgactgtgtcaatgctgcgctgcgtgataaaccgctcctcgaaggtgggggcgtcatgcagcagcgtgccgtcgaggtcggtgacgatgagtcgctgttcagggttggtcatggcgtttctccgtaaagcctgtcaggggggggaaaagaatcatgccggtctgcggctacagcagcccttcgcagtaggagcggaccagctccgcggaatgatgcagtttggcgagctcgtcgtcggcaagttccagctcgacaatctcgttggcgccgttggcacgcagctcggtcggcacgccgaggaacacgtcgcgctcgccgtattcgccgtcgagcagggtcgataccggcacgatgcggcgttcgtcccaaaggatggtctgcacgatgccggccaccgtcgaggcgatgccgaagttcgtgccgcccttcgccgcgacaatctcgttgcctcgcatacgggtcttctcttcgatctcatgcgtggagacggatgagaatcggtcggcgttgtcgttcaggaattgcgtgaacggcttgccgccgagcgagacggtcgaccatgcggtgaactgcgaatcgccgtgctcgcccatcacgaaaccgccgacgttgcgcgggtccagcccggtctcctcaccgatgatggtcttgagacgcgaggtgtccagcgcggttcccgtgcccagcacctgggtgcgcggcaggccggagcgtttccacgcgtaccatgccatgacgtcgaccgggttggagaccatgacgatgacgccgttgaacccggatgccatgacccggtcgaccacgtcgccgacgagtccgatggtgaagccgagttcgtcgagtcgggttgagttggccggtggcttgcgtccgacggtgatgacgacgatgtcggcgtccttgcagtcaccgtagtcaccgttgcgcaccttgacgtgccggtcctggaattcgctgccgtcatcgagatcatggctttcgccgagcgccttgccggcggaatgatcgatgagtacgagctcgttgcacagaccatgggtgacgatggcgaacgccgcggtggatccgacctgcccggtgccgacgatgacgactttgttcctgttcatggtgaccatgtcaaatgctcctcaaacgatatccgataaacgttgcccaatgaaatgagccatgatcaagtgaccatggctcaacgtgctgcatacagtgcttcagcgaatcgcgctcacaccaagttgaattttgtcatcagaccgagggcgatgatgatggcgacccagaccagcgcgatgaagatggtccagcggttcaggttcttttccgcgacaccagacgtgccggcgttctgggtcaggccaccgccgaacatatcggacagaccgccgcccttgcccttgtgcatgaggatgagcagcgtcagcaggatggacgcgatgacgacgatgatctcaagaacgatcttcagaatatgcacggggaaacctccattaaacgtactgtgtcatagcatagcgcagggcattgaaaaacgtgcggatatgcgcatgtttccctatcgacgtgtcgccttgagtgtcaaccgggcgatcttcgccaattcgtcggggtcgagcgacgcgccgccgatcaggaatccgtcgacatccggctcgccgatcagatgcgtcgcgttcttggacgacaccgatccgccgtataggatgcgcacagtatcggcgacggcggggccgaacatctcgccgaggtcgtcgcggatggctttggcggcctgctgggcggtgtccggagtggcgaccatgccggtgccgatcgcccagaccggctcgtacgcgatgatgagcttcgcggcctccttgtcggaaaggtcacgggtcacgtcatgcacctgtccgacggcgaagtcgagctcgatgccctggcggcgttcctcgaagctttctccgacgcacagtatcggctgcatgccggccgccaatacggcacgcacctgatcgacgatgttgacgtcgtcttcgggatggtacttgcggcgttcggaatgcccgacgatgacgtacgagcagccgaggtgcgcgatcatgtcagcggagacatcgccggtgaacgcaccctgtgtggtcaccgacacggcctgcgcgccgtagcggatcttgagcttgtcggcttcgaccagcacctggacgctgcgcagcgacgtgaacgacggcatcagggctatttcgcagcgggagtagtcgaagcgtgcgtcacgaagcagccatacgagtttctgcacgaaatacgtggcctcaagatggtcgaggttcatcttccaattgcccgcgagcagcgggatgcgtgacgccattgatgtcctttccgtatggagcggctccccggcgtcaagcgctcggggagccgaattgcgggtgaagatcagtcgaggaccttcagccccggcagctccttgccctcaaggaactcaagggaggcgccgccaccggtggagatgtgcgagaagccgtcctccgggaagccgaggttgcgcacggcggaggcggagtcgccaccaccgacgatggtgaatgcgccggccgcggtcgcgtcgacgaggccctgcgccacggccttggtgccggcggcgaactcgggaacctcaaacacgcccatcgggccgttccacacgacggtcttggagtcgacgatcttgtcgtggaagagcttctgggaatccgggccgatgtccaggcccatcttgtcggccgggatggcatcggcggcaacgacctccggggcgaccggggtgtcaccggccgggaagccggcgttgacgaccacgtcggtcggcagcacgagctcgacgccgttcttctcggcggtagcgatgtagcccttgaccttgtcgagctggtcctcttcgagcagggaggtgccgacctcgtagcccttggccttgaggaaggtgaacaccatgccgccgccgatgaccaggcggttggccttgtcgagcaggttctcgatcacgccgagcttgtcggagaccttggagccgccgagcacgacggtgaacgggcgctccgggttctcggtggccttggacagggccttgacttccttctcgaccagcttgcccgcggcggccggcagatcggcggccacatcgtagtcggagccctgggcgcgatggaccacgccgaagccgtcggagacgaagacctcgccgagggcggcaatcttcttggcgtacggggcgcgcacggcggtatccttgctggtctcctccgggttgaagcgaacgttctccagcagcaccacgtcgccgtcgttcatcgcggcgaccttggcctgggcatcctcgccgtaggtgtccttggccagcgggacctcgacgccgagcagctcgcccagacgcttggcgaccggggccagagacagctcagggacgaccttgcccttcggacggccgaggtgggccatcaggatgaccttggcgccttcttcgcgaagcgccgtgatagtcggcagcgcggccttgatacggccatcatcggtaatcgtggtgccgtccagcgggacgttgaaatcagcgcgcatcagaacgcgcttgcccttgagatctccgagatccttgagtgtcttcatgtgtatcctttcctatccgcatatgcgaggaatggccggttttagccaattcgaatattacaagcggcacggaacaaaacaccgcgcccatagcgaacatggacgcggtgcatgacgggatttgattccggcgcttatcaggagcagagggacgccgtcagcgtccgacagacgcgctggactgttcccggtcgcgggtcttcgcggtcttgtcggcgagctgcagcagacggcggatgcggcctgcgatggcatccttggtgatgggcgggtcggcgagacgtccgagttcctcaaggctcgcatccccgtgctcaaggcgcagctggcccgcggcacgaaggttttcggggatgtcgtcgccgagaatctcgaatgcgcggcgcactttctcgctggctttggcagcggccttcgcgctgcggcgcatgttggcgtcgtcgaagttcgccagacggttcgccttgccccgtgcctcgccgtcggtgcgcttgcctgtccactcccttgctgagtgcggggcgcccatgaggatgagcatgcgctcgatggcgtcggggtccttgagcgtgatacgctccgaactgcgcagctgtcggggcttcgccgtgatgccgagcctgcgtgcggcgcccgaaagcgcgagggcggcctcgttcgacgggcagatgatttcaaggaagccggctttgcccgggtcggaaagagcgccatgagccaggaaggctccacgccatgcggccttcacctgagcgatgttgccgctgatgatatccgcgggaagtccacgcaccagacgcttgcgccgatcgaggaggccggtctgcaatgccaacgctgcaccgccgcgctccacgtggatcatgtatcgctgcaccgtggcgccgttgggcgtcgagcgagaaacttgggtcatgaccgcctcatgcccatacagatccctgatggtgtcctgaagccactgggcggccttgagcgagtcaaactgcgcttgaacgatgatctggcgctgtaccagccgcagcccgccgccgaaacgaatcatagcggtcgcctgcgcctttttcgccgcaggcaattcgttatcgattgcggccagctcgcttttgacatcatccagaagagccaagagccaacctcctatgtcctgtttcttctcaatgtttccccggcctgctgggttctgctccctgcactgccaccggcttactgtgatacctaatcacttggacaagaatacgcgatgctgccggattatggaaacgaaatgtttgcatagtggctgcacggtctcgctatgcgcgcgcccggtgcagctcgcgggccgatacggtgacggatatgccgtgcgcgcgcagccgcctcgcaagttcctcgctcatgacgacggaacgatgctgcccgcccgtgcatccgatggcgatggtcacgaaatgcttgtcctcgtgagcgtagccttccaacgccacgaggatggcccgctcgtatgcgtccaggaaatcgcccgcacccggacttgacagcacgtaatcgctgacgggcttgtcttgcccgttgagctctcgcagcgtcggcacccagaatgggttcggcaggaaccgcacgtccgccacgaaatcggcgtccatcggcagcccgtatttgaatccgaagctgaagatgtgcacggccaccgtggacgggccggagccgagcatcgcctcgtatagtttggtcgacagctggtgaatgctcagcgaggacgtgtcgatgaccatgtcggcccgttccttgaggttgtccagcaggctgcgctcctcaaggatgccgtcgatcagacggtttccacgctgcaggggatggggcctgcgcaccgactcgtaccgcttgatgagcacttcgtcgctggcgtcaaggaacaggatgcgggcgcgcacccccaggtcgtcgagatggctgagcacggctgacaggtcgtcgaaatactcgcgcgaacgcacgtcgatgacggccgcgagcttgtgcacgccgtccttgccggcattggtcatcatgtcgaccagcgggaccagtagtttcggtggcagattgtcgacgacgtaccatcccatgtcctccacgcagtcggcggcatgggagcgaccggcgccggacatgcccgtgatgagcaggacctcgaagtcgtccgcgggctccggcctgttcccgcccgccggcggcacgggcgcgccggccgggctcatggttgcgtgatcgttcattacagtgcctcctcaagggcatgtcgcatcgcgggttccagcacatccgtcagggagctgtcggccgtgtccgcgccggtcatgaggatgacctgcaggatggcctgccacagcagcatctcctcaccgccgatcgccggccctcccttggccctccatgcgcggatcaatgcgctggggcgggggtcgtagaccacgtcgagcaggatgccacgcggccggaaggagtcgtcgttcccgatggcttcggcgaccgcgtcggcggcgtggccgggaatcgtgctgatgacgatgtccgcgtcccgcagggtgtcggccgacgcgtcgatcgtcttctcctcgtatgcgatggcgtcgccctcgccgatgatgtccggcagctgccagttcttgcccgggtggcgcgccgccacagtgatgcgtttgttcgtctgcccgttcttcagcatgaccgtgcatgcggcgacggccgaggccgcggtgttgccgttgccgatgacggcggcggaggttgcgctcttccaacggtcaggctccccgagggccttgagctcatggtcgaaggcgagcacgatgcccatgacgtcggtgttgtagaggcggatcgctggcagcgagcccgttgcggaggtgccgtcgggggtggcaccgggggtgatgccaggttcggcgggccagtcgaaaatcgcggtattggcgactttgagacgctgcgcccacatattggacggagtgccatagggctgaatggttttcttgagcggcatggtcaggctcagaccgcaccaggtcggatcaagccctttgagaaatccgtcgagatcgctttcgccgacctcgtgccgctcgtacgcccagtcatccagcccgagcgccttgtatgcggcattgtgcagcaccggcgacaacgaatgggctatcggcttgccgagcacggcgcaacgatgtgcaatcacggtcatacccctccttgctcactgcctatatcattcactgccaccatcgtaccgtaaatgttcttaacaaaatcgtcatagaccaatgaattccgctggcgggatatggacttcgcgccccagcggggacggagtccatggcgccccgctgacggggcggagtccatagaccgccagcgggggcgaacgaggtgtgcggttattcggtgtgaagggcggcgtggatggcttcggctttggcatggcctatgcccttgaccgcttcgagttcctcgacgctggcgtcacgcatcgcacgcactgaaccgaagtggctcagcaggcgcttctggtaggtctcacccacgccgggaatgccatccagcgcggagcgcaacgcgcctttgcgtcgcgtctgacgatgataggtgatggcgaagcggtgcgactcgtcacgcacccgctgcagcaggtacatgccttcggactggcgtttgaggatgatcgggtattcgtcgtccggcacccagacctcttcgagtcgcttcgccagaccgcagacggccacatcgttcacgccgcaatcggccagagccttcgccgcggccatgacctgcggatggccgccgtcgacgacgaccagattcgggatgtaggcgaaatgatgccggttcgtgttctgctggacgactcccgcgtcccgtatgccgtcaggagacgatgccgtcgtcgtggatgcggatgtatcggacgattcggcacggcgctcgttgtccatgctgtcgccggagtcgccggcgatgttgccgtgtctgaaccgtcgcgtcagcgtctcgtaaagggcgctcagatcgtcgagcgcacccttgccgtcatcaccgcgaatggcgaatctgcggtattcggatttcttggcgatggcgtcctcgaacacgaccatcgaggcgacctggaacgccccgcccacggtgttcgaaatgtcgtagcattctatgcgcagcggtgcctgagcgagcccgagtgccttcgcgacgtcgttcatggccgcggtgcgcgtgcccatgtcgctgatgcggctcatcttgctgcgttgcagcgcctgcccggcgttctcgttcgcccggtccatcagcgccttcttctcgccgcggcttgccacgcggatggtgaccacggcgccacgcagcccgctcaaccatgattcgagttctgcacggcgtgccggctcgaccggcacgatgacctcgcgcggcactggggcgattggcgccagcaggtccgcgcgaccggtctgttcctgccgttcgcgtctcgtgcgtgtcgcctgcgcgcgctcgacgctgctcttggccgtcaccgtctgcgtgctgccgatggcgtcgcgtctctccacgatggaggctcccccttcggccgccgacacgccctcattcccggagggcgagaccatggaaggggccgttccatcatgaggatcgacgttcaatccgttgtcggcagccacgtctgaatacacctgcatgatcaggtcgtcgatgagttcgccgtcggatacgtcctcgacgcgttcgacgctccagttgcgttctccgcgaatcgagccgtcacgcacgatgaaggtgtgcacggacgcctcaagctcgtcggatgccatgccgaacacgtcggcgtccacgtcctgatcgaacacgaccgcgttctgctgcatgacggtctgcagcatctggatttcgtcgcgcagccgcgcggccttctcgaattcgagttcggcgctggcgtccttcatgtcccgcgtcagctgggcgatgtagctcttgccgagccgaccggtcatcacgccgaccagctgctcgcacatgcgccggtgctccttgggcgcgattctcccgatgcatggcgccgagcatttgccaatcgacgcgagcaggcatggtcgcccggtgagttcggccttgtggaacacgctggtcgtgcaggtacgcaccgggaatgtgcgcagcagtttgtccaacgattgtctcagctcccacaccttcgcgtaggggccgaagtagcgggcgtcccttctcttgcggctgcgggtgacccatacgcgaggcacggcctcccccgacgatatcgccagatacgggtaggtcttgtcgtcgcggaactgcacgttgaaacggggatcgaactccttgatccacgtgtattcgagagtgagcgcctccagttcggtgccgacgaccgtccattcgaggctacgggcagtgagcaccatcgtctgcgtgcgcggatgcagcagatacagcggctggaagtagttggtcaaccggttgcgcaggcttttcgccttgccgacgtagatcacgcgtccttcgccgtcccgccatttgtagactccgggctgggcggggatatctccggtcttcggccggaacaggtcgcgcgtgtcccccagcagcggagccccgttcctgttcactttggcgaccgcatccgaagcgtccgcctccccgcgcagcgaatcggccgcttttctccacacttcgggtgaatgccgctcgatatcgttcgtcacagcatgtccttgaggaacttgcccgtccaggacgcttcgcattgcgccacctgttcgggtgtgccctgcgtgacaatcgtgccgccgccgtcgcctccttccggacccaaatcgatgatccagtcggcggacttgaccacgtcgagattgtgctcgatgacgatcacggtattgcctttgtctaccagcccctgcagcacgagcagcagtttgcgcacgtcctcgaagtgcaggcccgtggtcggttcgtcgaggatatacactgtcttgccggtggacctgcgctgcagctcggtggcgagcttgacgcgctgcgactctccgccggacagcgtgggcgcgggctgcccgaggcgaatataccccagtccgacctgcacgagcgtgtcgaggtagcgggagatcgacgggtacgccttgaagaacgtggcggcctcctcgatcggcatatcaagcacgtcggcgacggtcttgccgttgtatttgacctccagggtttcgcggttgtaccgcttgccgtggcattcctcgcattcgacgtacacgtcgggcaggaagttcatctcgatcttgagcgtgccgtcgccgtggcacgcctcgcagcggccgcccttgacgttgaacgagaaccgccccggaccgtaaccgcgcacctgcgcctccggcgtcttagcgaacagcgtgcggatcttgtcccacacgccggtgtatgtggccgggttcgagcgcggagtgcgcccgatcgggttctggtcgacgtggatgaccttgtcgcactggtcaaggccctcgacgcgcgtgtacttgcccggcacgatgcgcgcgccgttgagcttgtcggcgagcaccgggtagaggatcgtgttcaccagggtcgatttgccggagccggagacgccggtgaccacagtcatcacgccaagggggaaatcgacggtgatgttcttcagattgttctccctggcccccaccacgcgaaggcgcttcgtggcatgcggcttgcgccgcacggccggcacctcgatgctccgtcggccggcgatgtaatcgccggtgacggaccggggcgcctcgatgaggcgcttcgccggaccggagtaaatcacctcgccgccgtgctcgccggcaccggggccgatgtcgaccacccaatccgccctctcgatggtttcctgatcgtgttcgacgacaatcagcgtgttgccgaggtcgcgcagatggtgcagcgtctcgatgagacgcgcgttgtcacgctggtgcagtccgatcgatggctcgtcgagcacgtacatgacgccgaccagtccggagccgatctgcgtggcaagcctgatgcgctgggcctcgccgccggacagcgtcttggccgcgcgcgacagcgtcaggtagttcaggccgacatcgttgaggaatcccagccgggcccggatctccttgaccacttcgccggcgatcgtcgccgccgctccctccagtttcagcccattgatccacgctagcccgcgttcgacgggcatgtcgcatacatcggcgatggattcgccgtctacggtgaccgccaacacttcggggcgcagcctcctgccattgcacgcctggcagggaacctcgcgcatgtacgactcgtagtactgcttcatctggtccgagtcggtctcgtgataccggcgcatcagcgtgcgcacgacaccctcgaatccggtcgaatactcgcgcagccgcccccaccggttgcgatatgagacgttgaccttgaaatcatgcccgtacaggatcgaatgccgcacgtcctcaggcaaatcacgccatggggtgtccatggagaacccgagttcgtcggccaggccctgcagcacatgcccgtagtattcggtcgtggtcttgccgcctccccacggctcgatcacgccgtcggacagcgacttggaatcatcggcgatgaccagatcggggtcgatctccagcttgtagccgatgccatcgcacacagggcaggccccgtatggcgcattgaacgagaacgtgcggggctcgatctcgtccaactgcagctgatgcccgttcggacaggccctgtgctccgagaacggctgacgccgattcgggtccttctcgtccaagtccacgaaatcggcgacgatgacacctttggacaaccgcagcgcggtctcgatcgaatcagtaagccgctgtcggatgccgtcgcggatcatcagacgatccaccacgacctcgatggtgtgctttttctgcttggtgagcttgatgtcgtcggacagctggcgcccctcaccgtcgatcagcgcgcgggcatagccgtcgccgcgcagcagctccagaagatcggcgaactcccccttgcggccgcgtacaacgggcgcgagaatctggaatctcgtgcgttccgggttcttcagcagcgtgtccaccatctgctgaggggtctgcgcgctgaccagctcgccgcattcggggcaatgcggtacgcctgtgcgggcgaacagcagtcgcagataatcataaatctcggtgatcgtgcccacggtcgaacgcggattgcggtttgtggtcttctggtcgatcgacaccgcagggctcaatccctcgatgaaatccacatccggcttgtccatttgcccgaggaactgacgcgcatacgcggacaacgactccacataccggcgctgcccctccgcgaacagcgtatcgaacgcgagtgatgacttgccggagccggacagtccggtgaacacgaccatcctgttgcgcggcacggcgagatccacgttcttcagattgtgttcacgcgcaccctggatggtgatcttcagatcgttcgggatatgtgagatgtccgccaccaatgaggagtcggtcttgcgcatcggcgccttgcggatctcgcgcgacaggaatgtgtcgctgctcatcacacgttcgatcacgacgtccccgccgcccgatttcgacgtcttgcgtccagtcacaaccccgcctttcctcgcacatcccatcatcaacggtagatcatgctcaacaatacccgacttcaagacaaatgtcgaacatcagttcgatagcgtgtcccatattcaaacacatggaccatacaccgtccgatccgcgacgcccccgaatacgcaaaagccggacggccatcagaccatccggctttgcacggcgaaaccgcatcacggccgttccgcgaccgtcacacgatcatgcacacgccctcacacccgctgctgcagccagccgacgagcagaacaatcacctgagcaagcaggccgagcagcgcgaagaagccaatccacgcaatcgcggtggcggcaccgttcgagtaaccgtagccgtaatatccggaattgcctgagaacaggtagatgagccacgcgagcaccttcaggccggcggccgcgaccatggcgacgaacgcggccatcttgaaccactgcggtccgtgctgcacgacgttgagaccgatgacccacaccgccaggattgcggtgagcatgagccacggagtcgagccgaagaggaacttgtagccgaatccgctcatgttgttgccggcatcgacaagtctgaggaacgacaggaacgtctcgatgccgatgaacacgaccatgagaatggcggagatcttggtgaccgcgcgcacgttcatcgtgtcgaggaagctcggcccctgcggctggggagcgtagccgggctgctgcgggtagccgggctgctggggatacccctgcggatactggtatccggcgggctgctgaggagcctgaggagcctgaggagcaccataaggcgcctgatatgcgggctgctgcggggcttgcggctgctgcgggccgggctgctgcggatatgtcatggctaacttctttctgtgtcagtccaatatgatggtttcaatataccgctatttcatgtccggctgacgaaatactccacatatttgacgggtattcgttgtgcgatgccacaatattcgctgcaagacgacgcacgaatccggcacgcgccgtcatctattcgctgcgtagcgcccagtgcccgtcgcaagccgatttcgtctcgttgttccatgaccgtgacgatcatcatgttggcgatgctcataccgcccacgatcagcgctatcacgccgatcatcaggcccagcgtcgtcagcgagtcgtccgcggtgtttctcgcctgtgacaggtcagccgacgcggtgacgtacacgccgaagccgccgatgttcgccgcgtgggcgaggatacggcgaatcctttcgtcgttgcctgatttcgtgcgcacgcagatcgcactaatccggcgtatcatctcctcctagtccgagtattgcgagaacgcccattcgtcgccgacgatgacagagcctttgccaggcttgtcactccttccggtacgtgcgggatccttgaccaaggtgaatcccttggcgcgacattccctcacatagcacaacgccgcatgtcagccccccatcaaccgtttaccactcataagcgttttctttccagtaagagatccgttgaacaagccggatgggcgaccatgcccatcttcatactccgatggcggaatacgataccattcattgcatgccgaccatggttcctatacaactttcatcgtatcctcttaataacgtttgagtgttccatgaccagccgtcggatgctcactcagctctgaaaaccgcgacaataatggaaacggattggttctcacgcaacctacgtatccgaggaggttcccatgcgcatactgatcgtcgaagatgaccgtgacctcgccgccgcgctggacgacgcgctgcggttcgaggggtatgcgacccgcgtcgcatacaacgggctggaagcggtgcgcatgctcgccgagcaatccatcgacatcgtgctgctcgaccgcgacctgccgatcatgtccggcgacgcggtgatggagacgatcgcctcgaacgacatccccgtgtccgtgctgatgctcaccgcggcagcgcaggtcagggaccgcatcaacggtctcgaactcggcgccgacgactacctgatcaagccgttcgcctatcccgagctactcgcgcgcatacgggcgctgcaacgccgtgccggtaagggcgacttctccggcaccgaattctcacacaacggcatcgtcctcgacacggtccgtcacaccgtgacccgtgacggcaagcccgtcaacctgtcgccgaaggaatacggcgtgctgctggagatcatgaaggcggacggcagctacgtcaacgccgaggaactgttcgacaccgtgtgggcgggcgcatcagccaccgacctcacggacgccatcaaaaccaccgtatactcgctgcgacgcaaactcggcgtgggcaacggcatcacctccaccagaggaaaggggtaccgtctgtcatgaccgcatcacacgcagcagacgccgcaacagactcagacgcaacctcggaggcggccccggtcaccgacacggccgcggccattgccgccgccaaagacaccgccggcggcaatggccatacacgccgtcgccgccgattcccctggccgtcgacgttccgaggccggctcatcgccaccatatccatcgccgccctggcgatgctggccaccgtcatcatcacgcagaacatcatcgtctcacaggcggcacggcagcagaagaacaacatcgtcatgtgcaccgacaaggacaccggcgaactgatcacggtgtacttcgacaagaaccagaccagctacgacctcgatctggaggatgcgccggacgccgtcggcagctccgccaccgccgtctgctccccgatgctctcggtacaggaggataccgtcgagacctccgacccggagtccaccgtcaccaagattgaggtgacgcatatcggcaagacggcgagcgccctgaccgactccttcatcacgatgatgcagttcatctccatcggcacgttcatcattttcgccgtgctctcgctcatcgtgtcctggctcgtcggctctcgcctgtccaaacgcgtggccaagatcagcaagcaggtggaggcgttgaagcccggcgatctcgacgctcgcatcgcccccgacggcagcgatgacgagatcggcaagctcatcgaatccatcaacggcatgctcgaccgactgcagaacgccacggaagcggagcgtcggttcgtgtcgaacgcctcccacgagctgcgaacacccatcgccgccgtcgcgaccaatctggacgccccactgtcccaaggccgtttcccggccgacgtggagcctgccatcaggcgggcgctcgccgcgaaccgtcgcggcagcgacctcgtgcaggcactgctcacgctctcgcgcatccagagcggcgtcatcgatgccgaggacgtcaccgccctgcagctcgccgatttcatcgacgacgagctggccgaggtggaggagcaggccgataagcgcaacatcctcgtcaccacgcgcgatgtcgcaggcgacgtgcaggtccaggccagcaaatcgctgatggacttggccatcggcaacctgctgcgtaacgccatcatgcacaacatcagctcgggcacactcgacatcgccgcgaggcaggagcactgcgccatcatcgtgaccatcaccaacagcaccgacgaaacgctgccggacgatctgatgaatctgaagcagccgttccaccgcggcgaacactcacgcatcagcgccgagcccggcgtcggcctaggcctgtcgatcgccgacgccgcatgcgaggccatgggcgcgacgctggaattggacaggccggacgagcaatcgttccgcgccaccatcaccatcgcgtcggcatagattgatactgcggcaacggcccgtccagctacttcacgtactcctcaagcgtctggccggactcatgcatcgccttcgccgcctcggctcccacataccggtaatgccatgattcatacgcgttgccggtcacgtcggtcttccctcgcggatagcgcaggatgaatccgtaccgccacgcgttgtctgcaagccactggtgctcgttgacgctgtccttggtgctggtggccccgctcgcgttgatgtccaccgccaggcccagctcgtgctcgctggtccccggctcggccacccattgcgacgcctgtcttctcgcctcctccttcgacgcgccctcgttctgatacaggaatatcttctcgtccagcagctgccgctgcacggcctccgtacggtacgccgacgtgacctccgggtgaagccccgcggcacgcatgtcatcgaacatgcgctgcagatcgggatagatgcgcgaatccacgctctcgccgttgctgagcctggtcagtttcggtgccggatagtcgtcgggaatcctgttccaccggttgacgacaatcagactccagctcgacggagagtatttcgcctgtgcggcgccgggcgcaaacggtccccggcccgcgaaacgccccaggcagaacagcagcgccagtatggcggcgagcaggacgcccagcacgactgacacgcgcagcagcgtcctgcggttccttctgttccggcactcggcgaacgtccgaacgcgcccgtctcccgtcatcatccgttccatgcctgtcgctccttcactggtctgccgtcatcgcaacatcaccataaacattaggattcgtaaggtttcccggccatcgaccacggggacgaaacggcttatgatccgcggggatgacaaccccgagacacccctgagtcagtaccctgaccgccagtcggcacgtgttcgctatgatggacggttggacttcaacgaatacggacaacaacagaaagacgagcgggacacatggctattgaggcgcagggacttgagattcagatcggcgcgcgcaccttgctccatcccaccgatttccacgtcgccaaaggcgacaagatcggtctggtcggtcgcaacggtgccggcaaaaccacactcacccgcgtcatcaccggcgatatgctccccaccagcggcaaggtgcgcgtatccggcaagctcggctacctcccccaggacacgcatgccgccgaccaggagcagaccgcgctcgaccgcatgatgagcgcacgcgacatcgcctccatcatcagccgcatccgcaaagccgaaaaagacatgaccaacccggacccggacatcatgaccaaagccatgaaccggtacgacaaagccatgcaggacttcgacaaggccggcggctatgccgcacaatccgaggccatcgccatggccgacagcctcggcctcccccaggacgtcatgcagcgtcccctcggcaccctctccggtggccaacgccgccgcatcgaactcgcccgcatccttttctccgatgccgacaccctcattctcgacgagcccaccaaccacttggacgccgactccatcgaatggctgcgcggattcctcaagaaatacgaaggcggattcctcgtcatctcccactccaccgagctgctcgacgaagtcgtcaacaaggtctggcatctcgacgcgcagaccggccagatcgacatgtactccctcggctggaaagcctacctccaccagcgcgtcgtcgacgaggagcgtcgtcgccgcgaacgcgaggtcgccgagaaaaaagccgaccggctcatgaagcagggcatccgcctgcacgccaaagccaccaaggccgtcgccgcccagaacatgatgcgccgcgccgaacggctcctgtccgagacctccgacgcccagaagcaggacaaggtcgccgacatccgcttccccgaaccggcaccctgcggccgcacccccatcatggccaaggacatctccaaggcatacggctccaacatcgtcttcgccggcgtcaacctcgccgtcgacaaaggctcccgcgtcgtcatcctcggctacaacggcgccggaaaaaccaccaccctgcgcctgctcgcccacatcgaagaccccgacaccggcgtcgtcgaatacggccacggctgcaagatcggctacttcgcccaggagcacgacaccctcgatctcaacgccaccgtgcttgagaacctcacccacgtcgcccctgagctcaacgacactcaggctcgttccatcctcggctccttcctcttctccggcgacgatgccttcaaacccgcccgggtcctctccggcggcgaaaaaacccgtctcgccctcgccacgctcgtcacctcccgcgccaacgtcctcctcctcgacgagcccaccaacaacctcgaccccgcctcccgcgacgaaatcctcaaggccatcgccaaatacgaaggcgccatcgtcctcgtcacccacgatgagggcgcagtccaggccctgaaccccgaacgcgtcctgctgatgcccgacggggacgaggatctgtggaacgattcatatctcgacctcgttgccgaggagtgatggagtgtcggctgcgttgttcctcagtcgcggtaccctcgtaccgctttcttcggtacgccttgccgacacacgcatcacttcacggcaatccactgaacgaacaccacacatatcgggcctgtccgtacccttttgcgtgcttaagtgcgcgccggaacgacgaccgtgcgcacttaagcacgcaaaccaccggttttgcgttcctatgttcgcgcactcgtcgttccgacgcgcacttaagcacgcaaacgcgacttgacccatgaccttgccaacgttccggcgaatatcaacggcaaaaacgaatgatgcccggtggttcctgaatctcaggagccaccgggcatcattcgtaagacggccagacgatcaaatcacgccgatcagccgatcgcccgggccgatgtcactcggagtcgcggtaaccgctcgggttcttggtctgccaattcatcgacgacgcagccatgtcgtcgatgccgagctcggccttccagccgagttcacgctcggccttggaggagtcggcgtagcaggcggcgatgtcgccggggcgacgcggcttgatcgcgaacggaatcgcgtggccggcagccttctcgtacgccttgatgacctcaagtaccgagtatccgtgaccggtacccaggttgtaggtgaacacgccggggccctcgaccttgtcgatgacggcgacgtgacccttggccagatcgacaacgtggatgtagtcgcgcacgccggttccgtcgggcgtgtcatagtcgtcaccgaacacctgaacctccttgagctcgccgagtgcaaccttggcgatgtagggggtcaggtttgccgggatgcccttcggatcctcgccgatcaggccggactcgtgggcgccgaccgggttgaagtagcgcaggatgacgacggtccaggagtcgtcggcgacgtgcacgtcgcgcaggatctgctcctcgaagaacttggtcgtgccgtacgggttcgtggtgccgccgatctggctctcctcagtcagcggcagctccttgggcgtgccatagacggtggcggacgacgagaagatgaccttcttgacgtcgtgggcgcgcatggccttgagcagcacgatggtgctgttgaggttgttgtcgtagtattcgatcggcttggcgaccgactcgccgacggacttgagcgaggcaaaatgaatcacccagtcgatgtcgttctcggtgaagatgcggtccatcagcgcctcatcgcggacatcgccctcgtagcgcttgacggtcttgccggtgatctcctcgacgcgatcgagcgccttgggcgacgagttgctgtagttgtccacgcagacaacgtcgtaccccttgttcagcagctcgacatcggtgtgcgtaccgatgtagcccgcgccgcccgttaccagaatggtagtcatgtgttcctccttgaaaaacagctgtggatgactccaacagtcattctaatgctgagtatggaatccgaggccttccatgaagtcccgggtgagttccttgtgcttgaacacggccgtgttgcccaggatgcgctcgcatacgctgccgagttcgtcctgcaccgcggcgtggatggcgtcgcggtcgcgctcgccgttcagtgtcgcggtgagttcgtcccattcgagcgtgaactcgccgacctcttccggcagcggcttgccctcggcgagggcgtcctcgatcaggccaagctggttgatgagacggccgggcaggatgaacagcccctgcgcctcgatcaggccgatgggctcctgcttgaccggccagaactcgggatgcgcatggaagatgccttccggcagttcctcgctgaccgagttgttgcggaagatcaggctcatttcgtagccgcgctcggtgatgatcgcgctgggcgacaccgcggagcgcttgccgtcctcgccttcgcagatgatgtccagctcggggttggagtagttgatccagccttcgcggatcttgtcgcacacctcgatgatcgtgtcgcgcgatttggcgaccacgcgcacggcggtgccgggccagtcgaggatctcgatggtcgcgtccgggtattccggcagcgtcatcgtcgcccaggctgccgccttgtgcatcggcagcagttcgccgccgccctggtaatggtcgtgggcgagcacggagccgccgatgcgcggcagcgcggcgttgcacccgaggaagtatccggggaaccggtcgacgaagtcaagcaggtgcccgaacgtggagcggctcacgtgcatgggcgtgtgctcgtcgttcacgcagatgccgtgctggtagaagtacccgtacggggagaactgccagaaccacggttcgtcgccgagcgtggcggggatggtgcgcagcgtgcgcttgttgcgccccgcgaagccctcgttctcatggcagatcgtgcatgcggggtatccgccggccaccgagttgcccgcggcggccttcttcatgttcttgaattcgggcttggcgaggttgatggtgatgaccaggccgtgggagtcgaagcgcgggttcttgtcgagcacgcccttcttgacatagttgttggcgacgcagtagtcgtagaaccagcgcatggcctccatgccgccatgttcgcgttccactgcctcgaaccggtcctgcacggcggacggcgtgccggagagcatgcccatcacgatgtccgcgtacacgggtccttcgtcggcgtcgaacagccccgccgcgacggccgcggcgcggaaccgcgtcagcaggtcgtctggcagcgtgtcgtcgctggtcgcgccggtgggacggtacgagtcgagcgagaacagctcgaagatgcggttgcgcgtccagtcggcatcgcgcgggtcgagttcaagccgcttgcgcgcgaagtcgacgagcgcgtcgatgctcgcgtagacggcgtcgagtccgccgcaggcgcagtcgcccttcttctcttccgtggtcatcagcgggcggtcctttccatgacgtcgtcgacgatggcgcgaatctcgtcggccttctgctccatctcctgcacgagcttgatctgggtgcgagcgcgcacgaggttgtgatcggggtacttggtggcgaagtacgtgtcaccggcgaggtagtcggcgaggaagcgcatgccgcattccatcgtcatcatgttgccggcgaatgcgagcagctcggcctccttgtcggtgatgctgtcgcgcaccttgccgacgaagccctccgcgtaggcgcggaacagttcggtgctgaagtggaccttgtcgagatccttctcgtcttcaagcgcggtggacgcgccgaagcggatggaatcgccgaagtcgaacagcatggaacccggcatgatggtgtcgaggtcgatgatggcacgggccttgccggtcttcgcgtccatcaggatgttgttgagtttggtgtcgttgtgggtgacgcgcagcggaacggagccgtcggccagcccgtccatgatgcgggagtactggtcttcgtgggcgaggaagaagtcgacctccggcttgcaggtttcggcgcggcccatcttgtcggcttccagcgcagccttgaagtcgcggaagcggctcggcgtgtcgtggaagtgggcgatggtctcggtcagctgggaggcgtcgaagccggccaggaagttctggaactcgccgaacgcggcgccggactcgcggaacacgtcggcgttggggacgaggttgtaggagatggtgccttcgatgaacttgtatatcctccaggcgccgtccacctcctcgttttcgatgtagctcgcgccgtccttggtggggacgatgtcgagcgtctcctggttcttggagcgcaggtaggcggtgacgagttcgatgttgcgcatcaggtgcacggtgtccgggaagatgtccgtgttcatcttctgcaggatgtaccggtgctgatccgtgttgatcaggaaggtgacgttgatgtggccgtcaccgtatgcggtgatgcccttgacgtcgccgtcgatggcgaactgatcgacgatggccgccagtttcggatcaatgtcagtcatgtggaaccctcttttccttgttgtgccgcaggttgccgccggtcttcaccgccacaacgaccccctatctgaagctgctgtgccactgcgacgcagcagctgttggcgcatacgcaccgttatttgttaattatagttacataaatgacaaaccgccattcttcggcgtttatagttcctgaatccccttttctattgctataatataaagactgtggatttgaacatgaccacaccgcagctcgcatgatccgaatcatgagcgctctgacaagaaacgactgaaccaatgacctcgtacgccaacaccatctcgttccccctgcacacgcccggcaagacgacgaaggcaagtcccgccgacgtgcgccgcaacaaccgttccctggtgttcgggctgctgttcccgaacgggcaactatcccgcgccgacctcgggcggcagaccggactctcgcgcgtggcgatatcgggagtcgccaacagcatgctcgacgaagggctgatctgcgagagcggtttcggcgtcaacgcctccggcaagggcaagcgcggcacgctgctgagcatcgacacgtcgcgtctgcacatcatcagcgtcgacctgtcccaggagcatctggtgcagggagccgtgaccgacctgctgggcacgccacagcagcgcatggaaatggcgctcggaccggataacgacatcaacgcggacatgatcgtgcagctggtcgaccagctgcgcaccgacatcgacgccgacacgatcatcggcatcggcatagcggcgactggtgtcgtcgaggacggtgtcattcgcgaatcgacggtgttgggatggcgggaccttgatctgagaggcatgctggaacgtcgtttcggattccccgtcaccatcagcaacgacgtcgtctgctccatgctcgcggagcgattcttcgggcatggcgacaagagcatgctgttcatcaagatcgaccgtggcatcggtgccgcgacgctgatcgacgatgtgacggtgatagggcagaaccatgccggaggcgagatcgggcatatctccctcgacccggagtcgggggtgttgtgcccgtgcggcaagcgcgggtgcctggagacgatggtcacatcgccggtgattcgcgagcggattcgccgcgcgtcgacgcccgaggagcagctggacatcatccgatcctgcggcgagcagctcgccgcggcgctcgccatgccaatcggcctgctcgacatcaacgacatatgcgtgtacggcccgccggacatcgtgaacgcggcattcctggaggcgacgcagcgccgtgtggacatggtgtcgtcgtcgaagttccacaagcatacctccgtgcgacggtgccaggtgggttcggatatcgcgctgcgcggatccgccatcgacgtggttcatcattacatcgagaacggtcactgagagaaccaccgaaaggtccttgcgatatgaatcgagggccgctcccccgttcagggagcggccctcgattcatgttctgctcacatccggccgtgcggcccgggtggttttggaaactccgtcgccggtaccggtgtgcctatcaggtctccggcgcggcccacgcggcgcccagcgctccgaccggctggtcgagttgcgcaagcttgatgcgttcgccgagatgcaggcccgtcaggaacgggcaggtgcgctcgcgcacgcgcagttcgtccagggtgacgtcgatgagcggctggccggtcttcgccatgccaccgccgaagataatcatgcgcgggtcataggattgtgcgacgatctgcacggcgtcgacgatggcgtgggtgaccatgacgagtatgcgctgggcgtcaggctcgccgcgacgggcgcactcgatgagatccggcatcggaggcttgccttcgaccggccagtgacggccgaccgacgctccggagcacacggtctcaagacagccgctctgcccgcaggggcacgggaagcggttcgggtcgatcgggatatggccgatctcgccggcggcgccgctgaaaccgtgctggacgacgccgtcgacgacgatgcccgcggcgagtccggtgccgaagttgaggaacacgatggttccttcggggtgggatccgccgaccatacgcgcggcgccgaccgcggccgcattgacgtcgttctcgacgtgcacgggaataccgaggcgcttgcccgcttcggcaccaagctccagcgtatcgatgtcgaggttgacgacgttgtcgacacgaccggtttctggattgacctgtccggggatgccgatgccgaccgtggcgacctgatcgaacagatcgccggccacctcatgggtgatcgatacgacgtcgtcgatgacctgcgcgttgccgcgtcgtgcgggaatgcgcacgtcgttgcgaacattatcctgcggatcgacgagaacggcctcgatcttggtgccgccgatgtcgatgccgacgcggaagcggtcggcaggtgtctgctgtgctgtatcctgcactgtcatgtgttgtgtccttacgtaacagcggatatgcgcggttcgcacatccttgacgaatatgtggggcaaggcatatcgtcatgccttgccccaccgatgggtctgagtgtcagggcctccggaggaaggagaaggaaagcacggaagccctgatcctcaagtcttgctggccgatccatctgtccccgtccgtcccgcatcatgccgcgggacggacggggactgcacagatcagaggttgcgccaagcgatggcgctctggtcgaggtcgaaatgctcgaccgaaccgtcaggcagagccacatccgtggactgcggacggtcggtgttgttgatcacgcagtactggccggcatcggggaacaccgcgacctcgcactcggggttggtggagctgtatgccgtgtacttgtcctcgttgtgggaggcccagaacaggattcgctccagcagacgggcgttcgcggccgagtagggcagaccggagacgtacacgccgcggcccttgccgtactcgttgaccgcgagctgcacctgaccgccgtcggcgcgcagcagcgtcacgtcctcgttgaccgggaacgtgttcgcgaccggctcgccgaagtcgatgccgccaagcggcttgatgccctggccaccgccgcagcccgacagcgggatgcggtatccggccttctcccacgcttcgcgggcggcgggatcgacatgcacgtcggcggtgatgaagtgctccggcgtgacggttgggaagtacttgtccaccgacagcgtctggtagcgttcctcgtccacgcccagcacgtcggccagctggaagaaacgaccagcctggaaacgggccagcgaactgggctctccgacgccgacgaatgctccgccgccgcgcacccaggcgcgcagggtctcggtcagcttcgggttcttccacacgtctccaccggtgaacgcggtgtcgaccgggccaccgttgatgatcacgtcgatgtcgtcggcgacgccatgctccagcacgtcatcgaagctgatgaaccgcacgttcacgcgcatgcccgacagcgactccagaatgccgtaatacgaatacgtctgcttgttcggcagcgcgtgggcgaccgtgaacgccatccacgaacgcatcttgccccacgagttcagaatcgccacgttgagctcgccttcggcggcgactccaccggtacggtcatggatgtcgcggaactcgtcggcgatgtgggtgacggtatcgacgaacttcgggaacttcgcggccagcgacaggtatccgccgtagcccatacgcgaaatcggggaacgcaggatggcacgacgcgctttacgccagttgtcgagaccttcgatgctcggatcgttgccctcgtagaacgtgtcggggaagaagtacggcaggaaacgaccctccgtgtacttcacgcccgggatgtccgcgatcatgcgggtcgtggtgccgtcaccgatcgaaccgacgacagcatccagacccagatcctcgaaaccatccttgtacggctcggtaccgatccactggtcacccaggaacatcatcgcttccttgccggcctcgtgggacatgtcggcgagcttcttgacattggcgcgaacgaaaccggagaggaagtcgatccagtcgcgttgggccttgcgcggcacgcgccacgcggagttataggcgccgccatctacgaagtcttcgggacgcaggcggtagccgtactccttctcgaagtcgtcgagcgcggccgggctcacggtgcaggcgcagccgaaccagtccacgaccttctcgcgctgcttctggtcgaacagcagcgtgaactggtagaagaacgtcgtgaaacgcacgacatccacctgcgggttgtccttgagccactgctcgaacgtgtcgaacacgaacttgcgcgtcgccgggtggtagatatcgaacggaatctcgtgctccttgtcgccccacccgttcgtcaggtggttgtacatctcgaccggatcccagatgatgtacgcgaggaacgagaccgtgtactcgtgcatcggcgtcgcgccggagacatgcacggtatcggtgtcctcatcaagcgtccacagggaggcatccacgacctcattggtggtgcggtccacgacttcccagtacttgtgcgggtcggcgtcacggttcggcttgagctgctcctcgaagaagccgtccatcaggggaacatccacgatgtccgcttccgccaggacgcgcccggtgagcaggtacacctgcggggtctcgtccatgtgcagcgtgatccactcgttgtgtgcacgggtcgggaagtaggcgctgtagatcttcttgccgagtgcgagcacggactcgtcaaggtgtgtgccatcggaattacggatggcatcagcgccccacaattcggcaagttccttggttttttcagcgaagttctcttcactgggcaatgtgaagcggccagtgctggtcatgggttctccttcttgggaacagtcatcggggaaagatatatgggtgatgaaatcacgaaggccgatgaaatggccggcatcatcgcaggcccgctggatcctgactgcgcaaatccttgacgcctacgatgacgctggacgatggtaatcgtgtcactgatcgaggtgatggccgtaccgcccggcactcagtgacacatcatgccgggcggcggttcgtggttttctcccgcacatggcgggagaaaacatcagcccttgacggcgccggcggccaggccggactgccagtagcgctggagaccgaggaagatcacgatcaccggcagcacgccgagcagtgcgcccatcatcagggcgccgcgatcggtgaatgtggccaacgacaccatgccgtacagacccagggtcaccggcttgagggtgtcggaggacaccatcatcaacggcagcaggaagttgttccacgtggcgacgaacaggaacaggaagatcgtcaccattgccggggcgagaagtcgcagcacgatggtgaagaaaatcctggcttcgctcgcgccgtcgatgcgggcggcttcaagcagttcatcaggcacagagctctgggcgtacgtacggcccaggaagaagccgaacggcgagacacagcacgggatgatgatggacgccatcgtgttggtcagcttcagagcgtggaagatcgagtactgggggatggtgagcagggcggcaggcatcagcatgcaggccataatgatgccgatggcgacgttcttgccgcggaagttgaacttcgcggtggcgtagccggccatgacggacacgatggtgccgatgagtgcggagacgcccgagtagatcagcgagttcagcacccagcgccagaagttgccacgggtccagccgagcagcttggagtagttggtggccacggcgttggggatctggtcgagcgacacggagaaccacaggccattgccgctggtcatctgggagggcgtcttggtggacgcaatgatggcccagtaaatcgggaacaggaagtagatcagcgccaacaccagtacgatgaccgtaagtgtcttgactgcaggcgacggcctcatggaacggggcagatcgtgctgtgcagcctcgcgctgcttctccaaacgacgttcgcgcttcttgttcgcgcgcgcttcagcggttgcagagctcattactcgttcaccttcctttcagcaagggtgtacacgacggcaagcagacctgcgatcagtgccatgacgatggcgatggctgatgcggggccgtcacctgacggggtaagcgttccctgcgaagtattcatggccatcatcatcggcgtgtacgccttggagatgcccggatccgcggtggacatgatctgcggctcgttgaacagctggatggtgccgacgatggacagcagcatggcgagcagcgccgcgccacgcacgttcggcagcttgatcttcatggcgacctggaagccgttggcaccatcgatgcgggcggcctcatacaggtcgtgcgggatggcctgcagcgcggcgaggaagatcagcatgttgtaaccggtgaacgtccaggtcgtgatgttggccatggaaccgaggacaacgttgttggcaaagaagtcgacatggatgccgatggactccagacccttgacgattggggaaatctgaccgttgtacaggtagacccagatgatggaggcgacgacgccggggatggcgtagggcaggaagtagcccagacggaaaccggtaacgtgcttgacgacaaacgaatcgatgaccatagccagcgcaagggcggcgatgatcatgatcggcacctggatgacggtgtagagcagcacatggccgacaccagtccagaatttgccggaagtgatgacgtattggaagttctggaatccgacgaactcgttgaccagttcgccgccgccatagaggccgccgccttggctgacctgacggaagaagctggaatagacggcccagatgatgggcaggaggaacacgaaggcgaacaagattgcgaacggcgccatgaacgcccagccggttcggttctcgcgcttgaatgccttcgagcgctttggctttgcggcggcgcgtttcggcgcggcacccttggcctgagtaatggatgcagtcataatacaaacctgtcttttcgaaaaacagaaaaacgattccacgagcatgtactcttggacatatgaaaggccggagtccgaatccccggcctttcattttatgatgcctgaggcatcgggggtcttgggtgatggacggaacttttcagcttatccatcaccggaccgggttatgttcactccttgacagggagcttggcgttcttcagcgcttcgacggaagtcgtctgagcggtgtcgaagatgtcggagaccttggcgtcaccagtggcggccttggcagcagtctcgttcatcgctgaacccacggcggagaagcccgggatgtagttgaacgaagccatgttgtcgttcgctttcttgaactcagccatgatgtcctggttgctgaagaactcggaccacgcagccggagtcttggcagcctcagtggtggcggccaagaccagaccctgggagaccagatccggaacctgggtgttgaaccagtcgaggaacttcatggcctcggccgggtgcttcgagcccttgagcacagccacgccggaaccaccgtcggagccggtcttggtgccgttgccgaaccaatcgggcagctgggcgaccttccactcccccttgccggtgccaccggcggagctgatgaacagcggggcttcccaagcggcagccacagtgccgatcagctgacccttgttaatggaggcatcgaaggacggatcccaacgcgggttggtgagcgcggacttgtcgtcgagcagctgctggtacaccttggccacggccttggagcctgcagtctgggtgtcgaccttccaggcattgccctcagtcttgtaccacgcgccggaagcgccggaagcgccggacatcgtcatcatgccctcatcgggctggaacgtcatgatgtacttaccctgggcggcggtcttcttggcggtcgcgataagctcgtcagcggtcttcggcacggtgatgccgagcttctcgaactccttggcgttgtagaagtacgtcagggggccggtgtcctgcggcagaccgtaggccttgccatcgatctgcatcatggagaacggaccctcagcgaagtggtccttgtacttcgcggcctcttcggtgacgtcctgcaacagaccctgactgaagacctcaggcaactcggcgtatccgacctgagccagatcaggagcggcgccggccttgacgtcggtcgccagcttcttgatcatgtcctgagccgcgccatcgaacttggtggccttgacttggatgttcgggttgtccttgttccacttggccacgatgtcattgaccagcgtcatgccctttttatccggcaggcgatgcatgtaggtgatcgtcaccttttcgtctttgggggtattgctgctgttgttcgtgggtgaaccgcaaccggcaagggcgatgcccatgacagtcagcgacgccagaccagcaagcagtcgtttcttagctaccatattcctaactcctccattgagatggatgttgcctcctcgtcgtggcaactaattagttagtgtaaaggcatgccaaggaaatgtcaactacattaacatttgtgtcgtgtcaccggtcacacagatggtaacccacgacgtgcaacaccgcccgccagtaagcatgacagatttatgtatataaagtttacaatttatttttttctcttctagtcgtcaaggccatccccatcgacaacaacggagtcccccgcgaaaaaccttacggaacaccggcctatacggcgtgtcgtccattccttcggcgctcgaatcaagctcatcctcataatgtgacactcctcacattaccagagtcattctggtcacgcagccatcttcatcccgctcacgcgccgaccgcaatgccgggcacgatacggaaaacgccccggcgtgtcatcaaggacacgccggggcggggcgcaaaggcgatcggtaccgcggggcgtctactcgacgctacgcagctgcgctgctatctggatggcctcgacactggcttcggccttgcttcgcgtctcctgccattcggtggcgggcaccgaatcgagcacgagaccggcaccggcctgcacgctggcctgatgatcgcgcaggaaggcggtgcggatggcgatggccatgtccatattgccggagaagtcgaaatagccgactgtcccgccgtagatgcctcggtcagccgcctccagctcgtcgatgatctcgatcgcgcggggcttgggagctccggacagcgtgcccgccgggaacgccgacatgaacacgtcgaacgtggtcaggttcggatcgaccgtgccagtgaccgtcgagcagatgtgcatgatgtggctgaaacgcttgatgtccatcagctgcacgacctcgacgctgctgggcaggcagaccttgctcaagtcgttgcgcgacaggtcgacgagcatgatgtgctcgctacgctcctttggatcggcgagcaattccttggcaaggcgctcatcctcttccggggtggcgccgcgcggacgggaaccggcgatcgggaaggtcatcgcatgcccgttgtcgactttgatcagcgtctcggggctggaaccaatcacgttgaaatcgcgtccctcggcgtcggtgagcgtcatgaaatacatgtacggactggggttgagcgtgcgcagcacacggtacacgtcgaacgggtcagctggcgattccagatccagacgctgggatatcaccgtctggaacacatcgccgtcgacgatgtgccgcttcgtctcctccacccagcgctcatactcggccttggcggtgcggaaccgcagctggggctggggcaggcttcggtcaagcacgctcacgcgggcctcccccgccaccggcgtggcggccttgcgctgcatggcatccagccgttcgatggcctcgtcatacgcggcatcggcgcgggtcggccggtcgtcgacgttcaccgcattggctatcagccacaccgagccggacacatggtcgaccactgcgatgtcggtggccaaggccagcgtcacctccggctggccggtctcatccggcgccgcggcgcgcagtttgggctcccaatggcggatggcatcccagccgacagagccgaccagtccgctggtcaggttcggcagtccggccacatgcggcgccttgagcaccttgagcgcggcatgggccacctcaatcacgtcaccctcagtgggcactccggccggcacctggccgagccagttcgccttgccgtgatcggagcgcagttgagctatcgaattgacgccgatgaagctgtatcggctccaggaaccgccgtattccgccgattccagaatgaacgttcccgaacggcccccggcgagacgctcgtaaaagcccacaggcatcaacgaatcggcgagcagtcgccgcacgatgggaaccacacggtatccggcgtcggcaagccgatggaactgggcgcggtccggccatgtgccgccccattcgagatgctcgacgctgcacgcggccccatcatcgtgcaggccgccggccacaccggcatcgtcaatacgccgctcgctcatcacgcattctcctgttccgcggtacggtttccgacgacgaccggcaacgggccgccctcctcgaagcacgagcgcttgccggtatggcaggcggcacccacctggtcgacctgaaccagaatcgcatcgccgtcacaatccagcgccagggacttcacatactgcacatggccggacgtgtcccccttgcgccagtattcctgacgggagcgagaccagaacgtcacgcgaccggtcgtcaacgtgcgccgcagcgcctcgtcgttcatgtagccgaccatcagcacctcgtgcgtgtcatactgctggatgaccgcggcgaccagcccgcgcgcgtcacgcttgagccgcgcagcgatgcgcgggtcgagttcgtcggtgttgtcatagtcgatggtggattgcgtatctgtcatgtccttcatattcctgttcatgcccctatggagtcgtgttcatgcatgcggcgaatcatcgccggccggttccgccgcgattcacaggcgaaccgtgtatcccgcggaccgaagcgcctgcttgacctcgcggatggtcaccagaccgtaatggaagatcgacgcggcgagcaccgcatccgcaccggcggcgatggccgggggaaaatcagcggccttgcccgcgccaccggaggcgatgatcggtatcttgacctcgcggcgcactgccttgatcatctccaaatcgaaaccctcacgggtgccgtccgcgtccatcgagttgagcaggatctcgccagcgcccagttcctcggcccgcttgacccaccagatcgcgtcgatgccggtggacttgcgcccacccatcgtggtcacctcgaacccggactgcgtatgctgttcgccctgctcgcggcgggcatcgaccgacagcaccagcacctgattgccgaatcggtcggcgacgcggctgatcagcgtcggatcgttgatggcagcggtgttgacgcccaccttgtcggcgccgcaacgcagcagcgagtcgacgtcctcgggagtacgcacgcctccgccgacggtcatcgggatgaacacctgctctgcggtgtggctgaccacgtcgatcatggtctggcggtgcgagctggaggcggtcacgtccagaaaggtcagctcgtcggcaccctgacggtagtactcccccgccagctcgaccgggtcgccggcatcacgcaggttctcgaaatgcacgcccttgaccactcgtcccgcatcgacatctaggcatggaatgactcggacggccaacgacatgattgctcccttatcaagctcggttgttgtacggataccaagggtagcgtccgcccgttacagcagtgccgcggcgttccgctacatgggacgggaaggccgcgccctctgcggttcgagattcgcggcctgcagcagtgagagcgcggttaggccgcgaaggcctctttggtcttggcggcgagctggccgcaggcgccgtcgatatcggagcctcgggtgtcacgcagggtggccgtgattccggcacgatgcaggatatcgaggaactgctgctcatcctcgggcttggatgcggtccagcgagatccctcgatcgggttgagcgggattgggttgacatgcgcccaatcgtcgccgtaatggttgagccgcttggccagcagtcgcgcgtgctcggcctggtcgttgatgccgcgcatcaacgcgtattcgatgctgacgcggcgcttggacgacaggaagtaatcgtgggcggcgtcgagcacctgagtggtgttgaaacgcttgttcatcggcacgagctcgtcgcgaagcgcatcactgggcgcgtgcagcgacacggccagacgcaccgggatgccctcggccgcgagcttcctgatgccgggcacgacgccgacggtcgatacggtgatgttacgcgcggagatgccgaacccttcgggaggcatcgcgctgatctggcgcacggcggacagcacggaccggtagttgcccatcggctcgcccatgcccatgaacacgatgttgctgagccggccggggcctccggccacttcgccgtcgcgcatcatacgagcggcgacgcgcacctgttccaggatctcgccggtcgacatgttgcgggtgagtccaagcttgccggtcgcgcagaacggacagcccatgccgcagccgacctggctggagatgcataacgtggtgcggttcgggtaacgcatgagtacggattcgatgtgagagccatcgaaaaggcgccacagcgtcttgatggtggtgccctgatcggccacctgatgagtcacctcgtcgatcagaggcgggaagaacgcctcgacgatatcgccgcgtgtggcggcaggcaggtcggtgaacgcctcggactcggtctccagccggccgaagtaatggttcgccagctgcttgacacggaacttcggcaatcccagatccttcgccctggcgatgcgctcgtcaggcgtcatgtccaccagatgcaccggcggcttgccccgtcgggcatggtccttggacagcacgtcgcggaaagcccccttgtcgccgggggtgattccggtctccggctgttccgcatcctgcgcatgcccggtcgtcattgctcctccatcatcgttcgtatcttgtcgtcgtttcccgcatcgtcatgtccgatcgtcaagacgaccgtcacatgccgacaatccacagcagtccggccaggaacggcgcgcacatgaggatggaatccacacgatccatcacgcctccatgacccttgagcaggtgtcccatatccttgatgccgatatcgcgcttgagcatggacgcgcacaggtcgccgaacgtgcctgcgacgccggtcagtactcccatgacgatcggaacccaccagcgcgacgcccacaccgcgccgtcatacgtgcagaagaacaccgcgaacgcgccgatcatcgcgaacaggatcgaaccgaacagtccctcgaccgatttcttgggggagatgcgcggcgacagcttgtgcttgccgaaccatgcgccgaagaacaggccgccggtatcgctcagggccggcaggaacaccagcgtgatcgcgtgcgcgaccggatgcccgttgaacaccagcgacagcacgatgcagctggccagcgtagggatgtacagcacggtgagtatcgagacagcgacatgcgacagccgactgtgatgcagttcgcctttctcatgattgaacgacgactgctcgcgcgcggcggcgtcggagctcgacagcttggatgcgacggcgagcgaaagccagttgccgaagctgaaccgggcggtggcgagaatggccaccagcatcagcgtcgccatcgtcagcagcgccatcgtgccgaaatggtacgggctgtaataggtgccgagcaggatggccgccgaacacagccacagcgcgacgaccgggatatgcagaccgaccgtggcgaaatcgacacggagctcccacagcgcaagcaccatgaacacgacgatcagcagcacgaacacgtcgatgcggatcagcaggctcgccaatatgatgatgacgagcaccgcgccggtcgcgaccgcctgcggcatgttgcgcccggtcttcttgttgatgttcgccagggcctcctcggcctccacatgaagctggtcgttgtgttccatgatgttcaaccgcctccgtaagtcgatggtgccatgatgattctgccttcatcatagcgaaccggacgaggcgatggtcacatgccgcgtccggttcaacgatttcgtcatgaaggtcagacctccatgatctccttctgcttggtctcgaacagcgcgtcgagctggtcggtgacctgcttggtgaccttgtcgagctccttgagcagacgatcgccctcgtcctcgcccatctcgccgtccttgacggacttgtcgatggtctccttggccttgcggcggatgttgcgcacggcgaccttgccgtcctcggccttcgacttggcgagcttgacgtattccttgcgacgctcgctggtcagctccggcatggtgatgcggatgacgttgccatcgcggttcgggttgacgccgagatcggagtcgcgcagggccttctcgaccttgctggcctgggacacgtcgaacggggtgacggaaagggtgcggggctccggcacgccgatggacgcgacggccttcagtggagtcggagcaccgtagtagtcaacgacgatgccattgagcagcgcggggttggcgcggccagtgcggatgcccgcgaagttctccttggtgttctctacggacttgttcatctgttccttggcttgttcgacaggattggccattttgtgctccttgttgttgttcttcgttgaagttggtttcccgggttggatgcagacgcgcgatcaccgatgcgcgtcgctcacgcgagcgtggattcggcggtggacaccagcgtgccgatctcctcgccgagcagcgcgcgggtcacgttgccggcctcttcgagaccgaacacgcggatgcgcttcctgttgtcgcgggccatggacagcgcggcggcatccatgaccgccaggttgtcgacaagggcgcggttgtagctcagcgttgcgaaacgcttggcatctgcgtccttgcgggggtcggaggtgtagacgccgtcgacgccgttcttgcccataacgacctcatcgcaatgaatctccagcgaacgctggatggacaccgtatcggtggagaaatacggcatgcccgcaccggcgccgaagatcacgacgcggcccttctccaagtggcggatggccttgagcggaatgtacggctcggcgacctgacccatggtgatggccgtctgcacgcgggtggcctgcccctcctgctccaggaaatcctgcagcgcgaggcagttcatcaccgtgcccagcatgcccatgtaatcgccgcgggaacggtcgatgccggcctgctgcaattccgcgccgcggaagaagttgcctccgccgacgacgatggcgacctgaacgccctgccgcacggcggggacgatctcctcggcgatgcgacgaatcacctgcgtatcgatgccgacctttccgccgccgaacgcctcaccagacagtttcagcaatacccttcgtggctgatccgccgctactccatctgccatgcatagcctttctgatatcggttccctgatgcttcgtgagccggaaccgcccgacatactgcctatcagcgtatccgcaaactgcgacagtgcccggtagcgactcgcgcgatcacagcgattcggcgaattcctcgacccgggccaccacgtcgtcgagatacgacgcagaagtgcgccaccggccgggaacctctatcgaatgattggcctgcgggtactcatgcacgaggccactgagacgatgggcccggtcgctgcggtacagcgggtccgcggttcctgcgcagatcagcggttcgggagccgagccgggctcgtaatcgtcatcgcccggcacggggatgacggaccgtgtcggatcgaagtcggccggcgacagcacgggcgtcagcaaggccatcgggacgccgagccgggacacatgcgggtagatgaacgtcgacagcgatttcgccaccaccagggtgcgcggctgcgatgccggactcgaccggcgagggatgccatccagccagtcgtcgacagctccggacagcatcgagaatattctcggcgcgagggtcttcgacaggtccgcatcgacgtcgagccgttccacgaaccagccggcatcggccaacgccatcgcgcagtaatacagcagcggccgatcgcagttgtatccggtgcccggcatgatcagcgcatgccggtcggtcctatccgatgccatgcggttcttcggccattcgtttctgcggcaggtgggctgcgccgttccgctccccatcaacgatgaaatcatcgtcatgatcccccatatgatttttcgttattcgtgtgattgcatgctgtcggctggcatggccgcgccggccatgccaggtatgacaaaggcggccgacgcatgaaagcgcggaccgcctttgttgaggttcatctcagctcacaggctgctcccccggcccgatgatgcggaccggagcgggacgaatcaaaccttcgcggttcgattcactcctcttcgcccttgccgacctcgatgcgggcgaaggccacggccttgccgccgacttcctcgaacagcttgccgacggtcttggacggatccttgacgaacggctgctcaagcaggacgacttccttgtagaaggcgttgagacggccttcgacgatcttcggaacgatcttctcgggcttgccttcggccagggacttctcggtggcgacgcgacgctcggactcgacgacatcggccggaacgtcctcacggctgagccacttggcgcccatggcggaaatctgcagagcggcctcgtgagcgaccttggcaccggcttcgtcggtggcgatcatcgcgacgatgctcgggggcatctcgacggacttcttgtgcgcgtagatctcgacgtgcgggccggagatcttggcgaactggccgaccttgacgtgctcgccgaacagggcggccgcctcttcgacggcgaccttgacggtgccatcctcggcgttggacgccaggagctcgtcggcgttgttcgcgtcggcggccacggcgtagccgagcacggtgtcggcgaattcgacgaacttcggggtcttggccacgaagtcggtctcggaattgagctcgacggcgtaaccggtctggccttcggcggactcgatcaccttggaggcgatggtgccttcctgggccttgcggccttcacgcttgccagcggcctggatacccttggcgcggatgatctccttggcgcgggcgacatcaccctcggcctcggtgagagccttcttgacgtccatcatgccggcgccggtgtcttcgcgcacctgcttgatcaaagctgcagtgattgctgccattgatttgtctcctcgttaaaaatgtgtccccatagtgatgggaggctgttgcacctcccatactacaggaggtaggtcactcggccttggcttcctcggcctcggcggccggagcggcttcagcggaagcgccctcggtcagcagttccttctcccaagcggccatcggctgctcggcttcggtctcgccctcggccttggcggcccggccggaacgctccagcaggccatcggccactgcgtcggccatcaggctggtcagcagctcgatgccgcggatggcgtcatcgttggccggaatcgggtaatcgacggactccgggtcggtgttggtgtcgacgagggccacgaccgggatgcccagcttgtgggcttcctcgacggcgagcgattccttgttgatgtccacgacgaacatcgcggagggggtgcggaccatgttgcggataccgccaagctgcttctccagcttatccttctcgcgctccagcagcagcagttccttcttggtcagaccggagccgtgcacgtcggagaagtccatctcctcaagttccttcagacggctcacacgcttggagacggtctggaagttggtcagcatgccgccgagccaacgctcggacacgtagggcatgttcacgcgcgtggcctgggtctgcacggcttcctgggcctgcttcttggtgccgacgaacagcacggtgccgttgtgggcgacggtggccttgatgaagtcataggccttgtcgatcagctccagcgacttgaacaggttgatgatgtggatgccgttgcgctccatcaagatgtactgcttcatcttggggttccaacgacgggtctggtgaccgaagtggacgccggccttgagcatttcgctcatcgtgatctgtgccatagcactacctttcttgtcggttcttgcctggtcatgcgtacctgagtgcagccccgccgaagcgtggccgaccgacacaggccgtcgcggacatgacgcgatatggtgtgcaccggttgacgataacggttggccgtcgccacctgcgactgcggtgacggccgggttggcgcacaaatattcagaataccaccacgtgcctacttggcggcgtgctcacgcatgtaccgcaacgcctcgcgacgctccgtcttctccagccggtcgaggtacacgtgaccgtcgaggtgatcggtctcatgctgcagcatgcgacccatcaggccgctgccctccagcacgacctcgttgccgtccaggtcgatgccgcgcacgcgggcgtaatcggcgcgacgggtcttgtaccacaggccgggaacggacaggcatccttcgtcaccgtactgttcgccgctcttctcctccagcaccgggttgagcacgtatccgatcttcccgttgatgttgtacgagaaggcgcgcagcccgacaccgatctggttcgccgagagcccggcacgacccggatcgtcgacggtgtccagcagatcctgcacaaggcggcgtacggcgggcgtgatctccctgatcgtctcgcacggggtgcgcagcaccggatcgggaactgttctgatttcgcggatggccaattacttctcctcactggtgtcgttgccgtcagatgccgcgtcgcccacgctgtcctcctgctcggggctgccggatttggcttcgtcgtccttcatgaagcgaatctttcccttcgcctggtcgaaggcctgcttgacgctttccgaagactgcttcacggtctcggcggtcatgtcgaggatcttgacggtggcgggcagcggctttgcggcgttcttcggagcatagatcatgttgtcgatcacgtcggcgtaacgctgcagcaccttcgggcggaccaccttcatgctgggtgtcagagtgccgtcctcctggttgaactcctcgtccagaataacgaacttgcgcaccgactcggcgcgggagacgttgccgttggccttgtcgatgtactgctgcaccaacgctcggaccgcgtcgttggtcgcgatctcgctcatcggcgcgtcgatgtcgaggttctgcgaggcaagccacgatcgggtcatctccgcgtcgagttcgatgagcgcggcgatgaacgggcgtccgtcgccgatgacgacggcatgggcgacgatcgggcatgtgttgatgacatcctccatcggcgccgggctgatgttcttcccgccggccgtgatgatgatgtccttcttgcggcccgtgatgaacacgaatccccgatcgtcgatcgtggcgaggtcacccgtgtgcagccagccatcggaggtcagggcctcggcggtccgctgaggctgcttgtagtagccaaggaacacgttcgcccccttgatcatcagctcgtcgtcatccgcgagcctgatggagatgcagccgggccggccgacggagccgacctcgttcgcgtcctggaaattcaccaggcagggcgcggccgtctcggtcatgccatacccctggatgaaggtgataccatcgaatccgttgaagaagtgcgcgagatcggcattgagcggggcgccgccgcaggcgagccacttcatgttggggcccagggcggaacggatcgacgagcccacggtctgcatgtagaagctgtgctggatgcgggcgcccagggaatgatggccgccggccatctcgtccttcgaccactgcacgaaatgatcgaacgccttggcgaacaggcgccccttgagaccggctccggccttctgcgaggcggcgttgtacaccttctcgaacacgcggggcacgcccagcagatacgtgggcttgaagccgcgcaggtcggcgagcagccgcttggcgctggagatatagccgaccacgccatgcgagccgatggccacgtactggatgtaccgcgcgaagcagtgcgccagcggaaggaacagcagcagacggctcggctggtacagcatgtcgttgagtacctcatagccgttgtagaccgtgtggttgaagttgcggtgagacagcatcacgcccttcggtttgccggtggagcccgacgtgtacacgatggtgaacaggtcgtcggcgcggacgcggccgatcgccttgtccagttcctcgtcgctgacggactcgccgaaatcggcgaccgcgtcgaggccgttcgccttgaagttgaacacgtagcgcaggctctcgctgtgcgcgcgaatctgctcaaggatctgcgcatgggagtcgtcgccggcgaaggcgatgaccggttcgacctctgcgacgatatcacccgtctgtttgggcgaatcggtctcgtatacggggacgctcaccgcgccgatggaggcgcaggcgaagtccacgacgccccactcatagcaggtggcggcgtatatcacgaccatgctgccgggcttgaccccgaggccgagaagccccttggccacctcacggacgcggtcgttcatctggccggcggacacgtcatgccactgcctcgtctcatcgtcctgccattgggcgacgaggtcatcggggtcgcgttcgcaacgcttggcgagcagtgaatagatggtgtccaggtctgtggtctgatagatcgtatcgacggtgtattcacgcaacataggctccactataagcatggccgcgtaccggcacgcggccatgcggaacatatcatccggcttgcgcggcgtgtatcacccgatgtccgtcatcgtgcacagccagcggcatcccatctggcgcagcacgatgttcgaccagtagttctgcacgccgatggtcagatgcgtcgatatctcgaacgtcgtcggattgatgaacatccccgacatcatccggggcaccaccggcagataccggagtttggccttcagctcgggattcgactgcatgtggttgtcgagcaggtacgccatggtctccagcttcttgagacacgggccggtcaccgcccgtctgagcttgcccgcatgcagctgtccgcgcatgatgtcggcggacatgcatgctatgcgggcggacgataccgccagcgaatggccctgtgcggcgttgatgcttcccgcgccgcagctggtgatgtgatacggcaccggaacgtcggacgattctacgatgacgtacccgtcgaggctcggcaccgggcagggcgggttttcgcgcgcgtaatgataagtgggttgctccatgtccgtttctccgtcttctctctcgcccccatccacgatgaaaggggataatcccagcacaacacaacaaaggcacccctgcaatggacgagggtgcctttttgtgcaatcgtgccgcgattcgagcctccgacgcggaggcgaagcatcacggatcagacgtggtaggggttgacgaccaccgagcaacgctggaagctcttgacgtcgacatagcccgtggacgccatggctcggcgcagcgcgccgatgtagttcacctggccatcagcgcggtggctgggcccgaacaggatctgctccagcgagccgaccgtgccgacatcggtgcgggaaccgcgtggcagggtctggtgacgggcttccgcaccccaatgcttgccgccaccgggagcctcggtggcgcgggcgagcggagcgccgagcatgacggcgtcggcgcccatggcgagggccttgacgaagctgcccgaatcccccatgccgccatcggcgatgacctgcacatagcggcctccggactcgtccatgtaatcgcggcgcgcctcagccacgtcggcgatcgcggtcgccatcggggcgtggacgccgatcgtcgtgcgcgtagcggtgaccgcaccgccgccgaagccgaccaacacgcccgccgcaccagtgcgcatcaggtgcagggccgcagtgtagttcgcggcgccgccgacgatgaccggaacatcgaggtcgtagatgaacttcttgaggttcagcggctcatggccgagggacacatgctcggcggacaccaccgtgccgcggatgacgaacaggtcgacgccggcttcgaccaccgtggagtagaactgctgggtgcgctgcggggaaagcgcgcccgccacggtgacgcccgcatcgcggatctcatgcaaccggcgggtgatgagctcgggcttcaccggctcacggtagatctcctggatccgctcggtcgcgacgtcatcgggcagctgggcaatttcgtcgagcagcggctgcggatcgtcataccgcgtccacagaccctccagatccagcacgccaagagcgcccagccggcccatcgctatcgccgtggcggggctggtgaccgaatccatcggggctccgatgaccggtacgtcgaactcataggcatccacctgccacgacgtcgacacgtcctgcgaatcgcgggtgcgacgagagggaacgatggagacatcatccagcgcgtaggccatgcgggccttcttgcccaaaccgatttcaatttcctgagacatggtttcaaggctaatgccgggctgtgacaccggacgcggccgcacacgcgcatcacccgccgtctcacattgtggcgaataccgagcggcggacaacgcgcggtaacatcgatgcgctaagactggtgcacatacgccaatcacgctaggaggaaacgcatggccaaaatcaaggtcgagggaaaggtcgtcgagctcgacggcgacgagatgacccgcgtcatctggaaggacatcaaggaccgtctgatcctgccctatctggacgtcgatctggactattacgacctgggcatcgagaaccgtgacgccaccgacgaccaagtcaccatcgacgcggcaaaggcaatccagcgcgagcacgtgggcgtcaagtgcgccaccatcactccggacgaggcccgcgtcaaggaattcggtctcaagaagatgtggaagtcccccaacggcacaatccgtaacatcctcggcggcacgatcttccgcgagcccatcgtgatgagcaacgtgcctcgtctggtgcccggctggaccaagccgatcgtcgtggcccgccacgccttcggcgaccagtacaaggccaccgacttcaaggtgccgggcgccggacgcctgaccgtcaccttcactcccgaggacggctccgagccgattgagcacgtggtctatgactacggccaggacggcggcgtggcccaggtgcagtacaacgtcaacgattcgatccgcggcttcgctcgcgcctgcttcaactatggcctgatgcgccactacccggtgtacctgtccaccaagaacacgattttgaaggcctacgacggccagttcaaggacatcttcgccgaagtgttcgagaccgactacaaggacaagttcgccgaggctggcctgacctacgagcaccgcctgatcgacgacatggtcgccagctccctcaagtggcacggcggctacatctgggcgtgcaagaactacgacggcgacgtgcagtccgactccgtggctcagggcttcggatcgctgggcctgatgacctccgtgctgatgaccccggacggccagaccgtcgaggccgaggccgcgcacggtaccgtgacccgccattaccgtcgctggctcaagggcgagaagacctccaccaacccgatcgcctcgatcttcgcgtggaccggcggactcaagcaccgcgccgacctggacggcacgcccgaggtccgccatttcgccgagacgctggagaaggtcatcgtcgacaccgtcgaaggcggtcagatgaccaaggatctggccatgctggtgggaccggatcaggcgtggctcgacaccgagggcttcatgaacgcgctggacgagaacctttccaaggcgctgaccgcgtgaccggccgggcggggttctccggcggctcccgccaccggtgatcgccgccggcaatccatcgccatcaaggcccgcatcccatgtccccacacgagatgcgggccttgtgcgtatggtgaggctacaatcgaaagtcacagtattcgcatgactgaaagggcgtgaccatgtcaggacgacgcatggtgtcttgtctgaaactcatcgccgccgcgatggcgacgggtcttctgctcacgacggcgggatgcgcgtcaacggacgataccaacactccggacggcggcaccgtcacgcaatccaccggggcggtggcgatattcaccccatcggacggcatcaccctctcccagcacacgccgttgaacaagtgggcgaaactggtgcccgacatcacctccgagctcaagaagcaaggattcaaatccgcgaacatcaccacgaccacatccagtgacctcgccaagcagagccaggacattcaggattacgtcgtcaatcatgcggtgtcggcgcaaagcgggaaagacagcgccaacaagaaagacggtgctgacgagaaggaaataacgctgatcgtcgcgcccgcagccgaaacgcagacatccacccggcaatacggcgattacgtcagccagacgagcggcacggcgacggataggaccggttcagacgaggccggttcaacggatgcatcggaatcgactgacacatccgaatcggcgaatgcatccagctcggataacgcatccgactcgacggacacggaatcgatgccccgtatggcgaacgcattgcagctggccaaggactcgggcatgcacgtggtgctcgtggccaatccggtgaaggacttcacccccgatgctttcgtcgaactgtcgacagccgaacgcatcgggcagatccaggcgagcaagcttgccgacaaactgcaactcgacaccatcagcaaggacaatccgaaggccgtggagatcctgctgccctacaccgcatccgctgacggcagtgacgacgaattcgccaaggaggccttcgcaggcgcctggtccgtgctgcagccgtatttcaagaagggcacggcatacagtccgtccggactgctgacggccaacacgaccgacgggcagtgggagtcggtcgccttcaaaatcgacaaggattcgcgcatcaccgacgagatcaccaatcgtctcaaacagaagaattcggcctcgcacacccgaatcgacggcatcatcgccatgaacgattacgtggcttccggagtggtcgacgcgctcgaccatctcggatacaccggttcggcggccgacatcaacccctccatcacactgcccggaatcgtcggcaacatcaccggaaagcaggatctccaccgcaagaaggtgccggatccgatcaaggcgccggaaaacgacggcgacgccaccaacgacgggtcggcttcggaaaaggccagggacacgcagtggcccatcatcaccggatatggcgcgtacgtcgacgaactgccgcaactcgtcagcggccatcaatggatgaccgccgtcgaggaccgcaagggcgccgcgacgcagctcgcgcagatgtgcctgaaaatcaatcagggcacggcggtgaaatcgccgcagaacctgaccaaggggacgtatccgggcgtcgcggggaagaacatgccgacgctgcgccccgacctggtcgcgatcagcgcgtcgaacctcaagagcacgctgatcgaccccggctacatcactctggccgacgcggggatgtgacagccgcagggattgcgcgtcacagggaatgtagcaggcgcggcaataccgagatatacgcgagtcggccgtcaccccaaccatccgtcatgatgacgggaaccggttgaggtgacggccgactcgttgcccggctggacttccgctcagcggcccttcggggcgtaaatgcgcgtgtcgatgagttcgccgaagtggtcgatcaccgcttgacggcgtgccttcatgctggcggtcagcagtccgttctcctcggtgaacggctccggcacgatctcgaatttgcgaatcgactctgcccgcgacaccagatcgttggcggcgttgaccgcgcgctcgacctcggcgtagacgatcgggttgcgcacgacttcggcgaggtcggagacctgctccacaccctgcgcggccagccaggcgttggtctcatcgagatccagggagacgatcgccgcgatgaacggcttacggtcaccgatgacgacgcactggtccaccaccggcgatgtcatcacgctggcctccaatatgcccggagacacgttcttgccgcctgccgtgatgatcaggtccttcttgcgtccggtgatggtgacaaacccgtcgtcgtcgatgtcgccgaggtcccccgtgtgcaaccatccgtcaacgatctggctctgggtgatttcaggatggttatggtatccgacgcagaccgcacggctcttgatgcatagttcgccgtcctcgccgagccctaccgacaccccctgcagcggcatgccgaccgtgccgatgcgatatcccttggttggattcaccatggccggggcgcaggtctccgtcatgccatacccctcaagcagcggcagtccgacaccgttgaagaagtgtgcgatggccccgtccagaggagcgcctccggacaccgcatattcgcagtggccgccgaacacgcccatgatcgtgcgatagatcaggcggtcgtacatggcgtggcgcatccgcagcgaggccgagaacccgttgccctcctgctgcgcgtgcgaccattcgcgtgcggtggccgcggccttggcgaagatgcgccccttcatgccggcacccgccttctgcgaggcggcgttgtacaccttctcgaagatgcgcggcacggccagtatgaaggacggcttgaactcgccgaaatcagacagaatggtcttgaggttgttggacagccccagctccacgtcaccggcaaagcagtacagcaccatgtaccgcgcgaatgcgtgagccagcggaaggaacagcagtagacggcggtcacgcccataggcgatgtcgggcatggattgcgtaccggcataggtgacgtacacgaagttgccgtgtgacagttcaatgcccttcggcatgccggtagagcccgacgtgtacacgatggttgccaggtcgtcacccttcaccagacgctcgcgctcccagaactcctcgtcactcactccgcgcccgtattcctccagcgtgttcagcgcaccgaaatcgatgacgtacacgtctttcagcgtgctgcagcgcgagcggacggactcgatcttgtcacgctgcgcatcgttctcggcgaacgccatcgtcacctgggagtcattgaagatcgtggcgacctgagccggcgagttggtctcgtagacgggcacggtgagggagccgatggacatgatggccatgtccagcgcagcccattgccatgaggtggaagagatgatcgacaccgcgtcccccggcatgacgccacgggcgatcaggcccttggccagtgcgatgaccttgtcgcggaattcggcggccgtgaacgagcgccatgagccagtaccgtccttgtacgagaccagcggctcgttgggcttgcgttcagcgcgttcgaccagcaccgagaacacgtttttgtcgccgtcaatgggcttggcgaccggttgcgtatattccttgagcatttcagcactcccctcgactgtgggccggtcgttccggcgaacgggtggcatctgcatcgccaccgttcaattgtacggcttttccatacgaattcggggcagcatcgccgtcaatcgggtttcaggccgatgcgcatgggtctcacacgggcgagcggatcaagatatgtcgtcgccgtcccctcgttttgcagtcgaaccctcctgactccccaatggaggcatcggccgtcgcaatggtcggacgcccctcccacttcgccgatgacgtcgccgcgtctcacggctgttccggcaacgccctcggtatgcgccggctcgaacgtcgacacaaggtcaccgtggttgacactgacgaccgacttaccgccgacactcccggcgaacgatatgatgccatccgcaggggcatacagttcatcgccgtcggatgcctgcagatccacgccgcgatgcccggaaagccatggccggtcaggtgggtcgaaatccgcgatgacggccggctgacccacaggccaaagccataccgtccgacacgccgcctgtcgccctgcgcataacgtcaccgcggtgaagacctcttccccggcggatgcggagggcacccgcaatagcgcccagttcatcatcgcagcgaacatcacggcaacggacatgcagcacagccggatcatggtccgtttgcaacgctccctgcggcgaagcgcgaattgcctgcgccgtatggcatggcggtcataccgcacctgaggatggtgccacgctccccgctgcccatctaaatcatcattcagcatcagtctcttccccccattccgtcgtcggtcgccggaacgtccccgcgccccggcatccccagcatcgcacaccgatgcacggcggagggcgaaaaacgaccgatgtggtcgaaggctcgggagttatccacatttcggcgtgtcgcgccgatactgcacggcacttgctgctggaatcgcctgacaatgcccgggagctgtttgtaggcgagtgcaatccgggaggcccgtggccgcaggccatccccacttgcagggcccggagagctgtcgcgaagcgactgggggcggtcatccgcagcaatgcggcggatagccacttgcgtccccgcattgccacaccatcgatatttcgcgtcaaaatcgcattgtgtggctttccatcggccacacaacgcgatgtgagccttcacatcgcgttgtatggccgacattcgaaccataggacggccattttgcaatgattcgggattgttctcgtctccgtcccttgccacaccatcttaaaaaccatcagaatttgcatagtgtggcacgcggaggcgtgcacacgacggcgcatgcgatgcatcggtgcgcaggtgcggaatgagcgcgggaaagcaaaaaccctcaacgtttccgttgagggtttttctatggctcctgcggctgggcttgaaccagcgaccgtccgattaacagtcggatgctctgccaactgagctacgcaggaatgttttcctgtgctgagctaactgctgtgcacaagatgaatatattacacacaaatcgcatggatgcaacttgagtgctcgcctcggcgtgtcgcctgtaattccaatggttgattgatgacgagaactgacagtcggatgccgtggacgcaagcaaattatcggtttatcgacggtttcgcccgcgaattcccgctgtttgtaggcgagtgcaatccgcgaggcggaggggctacatgcagattttgttcatgggcatggcggaatcgatggggcaatcgggcgcggaaggggcctcgccggcctctacgaggttcacgccgagcatggcgaccatcgcgccattgtcggtgcacagcttgagccgagggatgcgcacctcgactccggcccgctcgccgtattcgagcagcttcgcacgcagctgcgagttggcggagaaccctccgcctacgatcagagtcttggaatcatactgctcgcacccgcgcatggccttgcgggccagaaccgtggccacggagtcagccagcgaagcgcacacgtcgtcaatgggaacgtcccgccccgcagcctgctgttcctcaatccaccgtgcgacggcggtcttgacgccggagaagctgaaatcatacggatgcgccgcaccggccttcccctgagtcaggccctgcggcaccttgatggccttgggatcacccagctgagcgtgacggtcgatatgcgggccgccggggtacgggaagcccagcaaacgcgcgaccttgtcgaagcactcccccgcagcgtcatccaacgtggtgccgaccacgtcgacatgccgcgcgacatcgcgcacatgcagcagcgacgtgtgtccaccggacacgatcaacgccagcgtatcctcaggaaacggcccgaattgcagctgcgtgacggcgatatgcccgatgacatgattgatgccgtacaacggcttgttcgccgcccatgcaagcgctttggcacccgaaacgcccacggcgagacatccggcgagaccggggcccgccgacaccgctatggcatccacgtcgccgagtcccaacccggcgtcggagagcgcctgggacacgcacggcacgaacgcctcggcgtgcgcgcgagaggcgatttccggaatcacgccgccataacgggcgtgctcctccatcgacgaggcgacgacgttggaacgcagcgtgcgcccctgtacgattgcagcggcggtttcgtcgcatgtcgattcgatgcccagtacgatcggttcgctcatggttgcgtctcctgtcctgtttgtttcgtcatgtcgccggcggcggacgtatcaccggcggcaccagccacaccgccattgccgctgaacccgacgatgcgcggttcaaggtcaagcgccatcacatacgcgtcgatgccttccggctggtagtaccgtttgcgcagtccgatgcgctggaatccgaaccggtggtacaacgcgatggccgggtcgttgacgacgctgacttcgagcagcatccgtctggctccctgtcgacgtgcgcgagatatcaggtgattcatcatcgcgaccgcgatgccctgcctctgatgggtcttgctgacgcctatgtccatgatctccgcgtcgtcgccgtcataccagtatccggcgaatccgcggatggcgggttcacagtccgtgtcgcgcccatccgcctcgtccacgtcgaagacgtatacgcgtgccggcgcgtcgagctcctgcctgatcgaggcctcgctccacgcatggttgccgaacagctcgacttccagcgcccttatcgcgccgacggccgtctcccgcccgatatcgtccagttcgcgcagcatcagtccgccctctgcgcgccagcatggttcagcacgtgtttgagcgggctgggtacttcggcatcgggccggcgcagatacagcggttcgacgggcgcttcgtcgtccgcatgtttcagcgccatctcggcgaacatcgccaagccggccgcccccgcatccagaatggatccctcgaccaccgagccgagagcatccagactttgccatgcgtcggcgtatcgggccgccccgtgaccgaccacgtccacgatgtatcgcatgccgccaatctccgcgcgacggcgtacctcggcgttgacccgctccacgatatggccggggtagtcgatgtccatagcgatccaatggcaggaatccgtctctgagcccgtcacgccagcctcatggttcagggagaagtacaactgtttgcgacgggcgtcattcacgcacagagtgatgtgatgttccggctccggtctcccgtccacctggccattttgcgccgtatgcgacacatccgcgaggaatccggccgcgtccgctatgacggcatcgccgcgcagggcggcgcgcaatatggcgtcctgcggatcgaggatgttctggccgatcagccgggcccccgtggcgaaggcgagcgccttggctgtgaccagccccgccctcagtccggtgaacggggccgggccgacgccgacgacgatgcagctgatgtccgcgggaccgagcccggcggcatccatcgcacgggcgatgttgacctgcagtttctcgacgtgggtgcgcgaatcggtctccacgatgggctcatgccccacgactcccacggtcgaaccgtacgaggtgtcgatcaccaacgtgcaaccatcagtcgcctgcatttgttcctcccgttcatacgcaacctgtacgagtctacatcgtccgtcagtcaccatcatcaggcggtcggggtcgtgaatcgcgagatacgcgccccatcccacgccgggccgaccggtaccagcgtgacgactctggtgccatcgcttgtcggctgcctctgcgcggttttgtcgtcctgcccgtcatcgagcgggcggtcgatatggacttccagacgttccggagccaacgtggaggccatctgctcgccccattccatcaggatcacggtgttggctccggggtcctccagctcctcgtcgagaccgagcgattccaactcgtccaacagtctttcctcgacgtcctgtccgggcgcataggcgtcgccgccgaggcggtacgcgtcgacatgcaccaggtgggcgtgcgacccgtcggcgaatcgtccgtcaagttcgcgggcgatggtgaacgtcggcgacacgatgggttccgttatgcccaatccggcgccgatgccctgcgcgaacgtcgtcttgcctgcgcccagcgggcccgacagcaacagtacgtcgccgccgtgcagcagcaaggccacacgccggcccagttcgcgcatgtcgtcgtcggtgggcacgcgcacaacgacgggatgcgcggcgtcggctccctggttccgtgtcacgccggcgttgcccgtttccgctgtttccatcgtttctttcattcccgtccctgccgttcctgtttcaatttcgatgtcgtcgttcatgtcatgcatgctctgcgggcacccggccgtggtcgcctcgccgcagggcgccgttctccggcgcggtcagtcccttcctttgtggctgatcagttcgatgcacctctccagcgcgtatacggggtcgcccccgttggttttgctctgttcgtccgcccaggcgagcatgcggatgcactgcccgagtcccgccgaggtccaacccgaaagctgtctcatggcgtttttcagcacccacgggttcgttttcgcctgggcctgcgtgatggtgccggccttgactgcggatgccttggcgatggtgcgcagtttcatcgcgagcgcaccgatcagcgcgatggggtccgttccctgttcgacggcggaacgcatggcgatgatggcctcggccgtgcggccggctatggccttgtccgccacggagaaaccggtcacctgcgggttcgaggtcaggtaccggttgacgagatccagggtgatggggtcgtcatcgaaatcgaagcacagttgggagcacatggcggccatttctccggtccgctcgccgagcaccgcgacgagctgctgggcggccaatggctcgatgcggcggtgctccccctcgaatatctgcagcacgaagttgagtttcgcctccggtttcttcaggtcggcgaccgtctccttgcacgcgcccgccttgacgagttggtcgagcagccgtttgcccttgacccctccttcatgccggcagatgacgatgctggatgcacccggatcggcgcatgcctgacggcagtagcgcaccatggattcgcccagcttgtcgtcggcgttctgcagattgtcgacgacgaccacggcgacatcggcgagcagggaagggctgacggcctcatcgaatgcgtactggtcgcagccggtcgcatccaggtcgatgcgctcggcgtcgggccgatcgtgcagcgcacggcggatgagatcgcgcccggttcgcttattgagatatgcgtcaccgccgaacacgatgatgaacggggcttgcgagcctgccttgtttgccatggtctccatcttcccatacagctggacaagagccgtcatgcgctcccgtcatcgatgcgacgggaatggctcccgccgtgactttcatgtgcggcaccggccggtctcctccgtcggtgtcgccgtcgaacatcgttacggtctgcgaccaccatatccgtatccggtcacgcagacggggacggaacgactggccgccgtcgccggatccgtcggatctcagcagacgcaaccatcgggtggccagtatcagcaccgtggcgcacgccgattcgaccaacaccatcagcaatgcacccggtatgccaccggcccacggcatggtcgcgaactcgttgtccgacaccatcgcggcgacgcgttccatgacggacgtgccgcatcccgcaatccaggccaagacgtatccgcattgcggcatcagccaggatatgaacagcgcgacgagccctgccatggtggcgaatcccacgaccgggccgacgagcagattcgccggcaccgaggcgagaggcagttgcggatccatcaggacctgtatcggcagggtgagcgactgcgcggcgatggtcatggcgagcggagccgacagcaatcggggcagcatgcacgccagccaatcggtcaaggggccggcgaacagcacgatgcccaatacggccgcgcaggacaacgcgaaaccgtagctgaccgacatcgagggagcgatgagaaggacgatgatcaccgtccagctcagcgaactcaccgactgccctcgacggccggccgccaccgcggcagcgccgaacagtcccatgagcaatgcgcgcagcaccgaatcggacgggaacacgactatcgccagcatcacgtccgacaccgccatcaccagtcctgtcgcccatcgaggggcgagcacgcgggagcacagcctgtgcaccagccccgcgatgaccatgaaatgccctcccgacaccgccatcaggtgcatgatgccgctgcgccggaactgctcctcgagtagcgccgcatacgcggcatcgacgccgccgacacgttccgtccccgatgacaggccttcttcagacccatgtgacgccgcaccggatgcggtatcgcgcacccggaccgcatcctgcccgagcacgccgacggtcagccccggcaccagcacgcgcgcctgatccgacaggcggtcgcaggcgcgcagtagcccctgctgcatggccttgacgatgcgggccgttccggaaggcgcagaaaccacatccggcacgcgcatatcgtcacaggtcagccacagcggctgacggccatacgacgccgtgctcagcatgccgggaaaacggtagaccgccgtgtcggtcagcgccgaacagacgtctcccgacaacagcacgcggatatcggcgcgcgaaggcaccggcgagcgttccgacagcggattcgccggggatcgccgtatggacagcgacaccacgcgcccgtcaacctggcaatcggaacccctcaccgtcgacgatacggccggggagcgcacccgcaccacggccaccacgtcggcgggcccgtcacgggcctggacatgcgccgcatcatgccagcgcacactgtccgcggtcaccgccgcggcggccgacagtagtccggccacggccatcacggccacggcatccccgagcgaggctcgcaacgggcgtatcagcccgtgtgccgccagcgacggcacaacgagggccaccggcagcagcatcacagccagcgcaccaatcgcataccccgtgaccgacatcgggtcatcatccatcaaggtcagccatcgccaccattggtgagccgccgccgaagccatccacgcggcgagagccgccggcagcatcctgaagtccctaccgccgttttcgcggcggatggcgaaggcccgcgatgacgggcgttcccgatgcccatcggtcgagtcgcgacgccttccggtatggttcctccgacggcggtcgtggcagccgccaccctgcatatgcccgtcatcccgcatgtaccgtctcctcatcccccacctcacacacgcacccacggccgtatcttggtgagcgtcttcgcgccgatgccggagacatccagcagctggtcgacgctggtgaacctcccgatgctgcgccggtgatcgagaatgcgctgcgcggtcaccggccccacgccgggaatggaatccagctgctctgcggtcgcggtattgagatcgatcctcgtatctgcggtggccccatcgtccgaaccgtcactcccccgctgcgatgatcgcccgttctgcgcagcctgactgcccgcggaggactccacgccgtctccttgcgattcggcgtcgcccgccccaccggaattctcctgatcggagcccgttccaccagagttcgacccgtcgccattcacggagtcgctgccgtcacttccaccgggtaccgtttcggcgatacccgtttccttccctcccgcgttctgcatcgcggcgttatgggattgagccgacacgtaccgcagggactgctgcagcagcatcgtcaggctcgcgcacagggccgtggtcagcaccagcatcaccgtcaccgcgtggaacgggcggaatctcagccgcggcacgtcccgcttcgcggactggccccgcatgccgtcgtcagggcgcacacccatcagacggcttattggctcgacggcaggcgcggtggaatcggccacgtcggcatgtttctcggtatgactctcgccatgcgacggcaccggtctggaaaaatcccccggtgccggcgccggaggagaaggcacgcccgttccggcatccgtcgcgacggatgttccgatcccgattacgtcaggcatggcaggaatcccggcgtggcggccatcgtccatgccgcgcaaccgccgagtcgccgtttgatcccctgaatgagaaatgcccatgcttccagcgtgagggaacatgggcatgaagtccagccgaatcggcctatgtggtcgaaggctcgggagttatccacattttcggcgtgtcgccggcggaatcactcggcggggacgatggagacgatcttcggggccttgacgatcaccttgtgcggcgtcttgccgcccaaccggtcggcgaccgcctcaagcgcctgcttttcgaggtcggccgggtcgatgtcaaccggcacctcaagcttggcacgcaccttgcccttgatctgcaccacggcggtgacggtgtcatggccgacgtacttctcgtcggcgacgggccacggctcggcggacagggattcgtcatgcccgagcttggaccacatctcctcgcagatgtgcggcgcgatcggtgcaagcatgaggatcagaggctcgacggcggcgcgcggcacagcgggcagtgaggtcaggtggttgttgagcacgatgagcttggcgatggcggtgttcggacgcatgccctccatctccacggtcacctcggcgatcgtgttgttgagcagcttcagggtcttgacatccggggtgtcctcggtcacgtgcgcctcgccggaggtctcgtcgaccacgttgcgccacagtcgctgcaggaagcgcatgccgccgaccacgttgcgcgtgttccacgggcgggactcgtccagcgggcccatgctcatctcgtacaggcggaacgtgtccgcaccgtagttctcgtacatgtagtccggggtgacgatgttcttcaggctcttgcccatcttgccgaactcgcggttggcgtgctcgccgttccacgtgaacgtcggctcgccgtcagccccggcggggccttccacaacctcatcggccggcacgtactggccacggtcatcggtgtaggcgtacgcctggatcatgccctggttgaacagcttgtggaacggctcggccgaatccacgtagccgaggtcgaagagcaccttgtgccagaagcgggagtagagcaggtggagcacggcgtgctccacgccgccgatgtacaggtccacaccgccctcgtcgcccgagtacttgttgtggttcgggcccatccagtagtcgaactcgtccttctcgaccatgtgctcggtgtcggacgggtcgatgtagcgcatgtagtaccagcaggagccggcccagttcggcatggtgttggtgtcgcgatagtaggtcttcttgccgtcgcccaagtcgagctcgaccttgacccagtcctcgttgcggctcagcggcgcctccgggttggactcggcgtccatcgggtcgaaggtgcgcggctcgtagtcgggcacgtcgggcaggttgatcggcaaagccgagtccggcagcaggtgcggggcgccgtcctcgccatagacgatcgggaagggctcgccccagtagcgctggcgggagaacagccagtcgcgcagacggtagctgaccgtgcccttgcccacaccggcggattcgagccaggcattgaccttggcgatggcgtcatcgacgcgcaggccgttaaggctcagcgcgtcgcccttggcggcggtggcctcgacggaggagttgatcacgataccgtcgtgggagacgaacggggccttgccttcgtaattggccaggtcgtcgccggattcgggcaggggcttgacggtgtagatgaccggcagagcgaacttgacggcgaaatcgtaatcgcgctggtcgccgcccggcacggccatgatggcgccggtgccgtaatccatgagcacgtagtcggcggtgaacagcggcagcttggctccggtaatcgggttggtggcgtacaggccggtgaacaggccggtcttctcgccgccctcatccacacgatccttggcggtcttggcctcggcagcgagcctgtaggccttcactgcctcgaccggggtggcatagccgcccttccaatcctcgggaacgtcggccggccattcggcgggcacgttctccagcaggtgatgctccggggagacgacggcgaacgtggtgccgaacagggtgtcgggacgggtggtgtagatctccatgtccttgctgccgtcggcggtgtccacggtgaagtgcacggaggcgccgtgggattcgccgatccagttgcgctgcatgagcttgaccttctcgggccagtcgatgccgtcaaggtcctcgatgaggcggtggccgtacttggtgatgcgcatcgaccactggcgcagctcgcgctggaagaccgggaagttgccgcgttcggacttgccttcggcggtgacctcctcgttggcgagcacggtgcccagccccgggcaccagttgaccggggacttggagatgtaggcgaggcggaagtcgttgaggatgtcctgctgttcggcctggtcgaggtcggcccacgccttgccgtcggactcatggccggggatggccttctcgccggattcgaacttggcgacgagctcgctgaccgggcgggcggagcccttggagccggaggggttcacggcgtcctcgtcgtaccaggaatcgtaaatgcgcgagaagatccactgggtccagcgcacatagccggggtcaatcgtcgcgaaggagcgacggtcgtcgaaactcagtcccatgcggtgcagctggcgggacatgttggcgatgttggcaagcgtggtgacgcgcgggtgctgcccggtctgcacggcgtactgttccgcgggcaggccgaaggcgtcataacccatggcgtgcagcacgttctcgcccttcatgcggtggtagcgggaggccacgtcggaggcgaggtagcccagcgggtggcccacgtgcaggcccttgcctgacgggtatgggaacatgtccatcgcgaagtatgccgggcggccgtctgcgttgcggcccttgccgtccttgaggtcgccgttgacgttggcggcccagaacgtgcccttgtcatcccagatcttctgccatttgccttcgatgtcctgcgcgagtgccgcgttgtaacggtatgcgggttcggtggaatcggtggacgcgggttgcgtggtcttctcgttgtcactcatagacaaggattatcgccacgcaactggacaccatcctcacgcaggtcatggcatgccgcgcatccggtcgataatcgacgtgcgacgccgacggggcgagccgcgcgcagcccgccggccttcatcattcgtcgccctgctccgggtccgacgacgccgcgggatccggcggattgagcttggagtcgacagtgtagccgatctgccggcgcatgccccgcacggcctgccgccacgtgccgtcgtcgatcatgtcgctcagtatgtcatcgatgctgtcggcgagctgcgtgttctcgtgcttgaccgcgatgccgtatcgctcctcgccgaacggagccccgaccacctgcacgtacccgttgcctttcacggtcgcgaggccggtgaggatggcgtcgcccgcggctacggcgtcgacgtcaccgatgagcagtgacatcaggcactgcccgtaatcgtcacgctcctcgatggacgccttgggcgcctggctgcgcacggcgtcggtcacgtcgctgccggcaaccacgcacgccttgcgcccgttcatgtccttgatgccggtgatgtcgcccgcgtcggcggccctcaccagcagatcctgccggacgattagatacgggccggtcatcgtcaccgccgactcatgccgttcggtgatgccgaagctggacaccaccatgtcgacctgcgcgctttccagcatggagacgcgggaacggggcgtcaccggcttgaagacgatctgcttgtccgcgtatcccagcgccttggcgacgtaacgggccacatccacgtcgaagcccgaatacccgccgttgtgccatacgcccagaccgggctggtcggaggcgacgccgatcgacaccgtgggcccctccggctgccgtatcgacacgccgttcgcatcatcccgggaactcgaggagccgcaggcggtcagggatcccgcggtccacagcaccgcagccagcgccgccgaaaagcgacgcatgatgcgccggcgccccgccttcgtgtgttgcagccctgtcatgccgttcccgtcatttgaacatgcgcgaacgggtcaggaaccacgcgacgacggcggagagcacgacggatatcacgatgatcagcgtgaagccccatgtcttgccggtgaacggcatgcccagctgccccggcacgaagttcatgccgtacatggagaagatcagcgtcgggatcgacagcgtgatggagatgatcgtgaagatgcgcatcacgttgttcaggttgttggagacgatcgaggcaaaggcgtcggtcatgttcgcgagaacgccgctgtagatgttcgccatctcgatggcctgcttgttctcgatgatgacgtcgtcgagcaggtcctcgtcgtccgggtactgctggatgcgcgcgagcgtggtcagcttctccatgacgatctcgttcgatttgagcgacgtggtgaaatagaccaaggtcttgctcagctcaagcagcatcatgatctcgcggttctgcatggcgtgacgcagcttgaattcgagcttgtcgctttcgcggtcgatgatgcgcaggtacctcaggtatgtgctggcgttgcggtagaggatctggaggatgaagcgcgaacgcatgaacgtgttgaaccctcggatcgttccctccatgaacgggtgcagcaccggcgtgtcctgcatgcatacggtgatgatgaggtcttcggtgacgatgatcgacagagggatggtctcgtaccagtcacggcccccgcgctcctcgacggtcgggatgtccacgatgatcatcgtgtaatcgtcctcgacgtcgatgcgcgaacgttcctcgtcatccaacggggcgcgcaggtcggcgaggtcgacgccggtctgctgggagaccgtggcgagctccacgtcggtgggttcggacagacacagccaggagccgttctcaggtttttcgatctgctccacttggccgttaatcgtgctgaacatcctcaacatgtagtctcacccacctctcataaccgaacactaccgaacatgaccggacccgcgggcggcatgtcacgtcgtctggaagcctcaacaaggatagcccttatgccacgacttgcaaatccgccacggccggccccgccgccggcctcacccctcgatcggcttccacatcggcatgtgcgggccgtgcagggactgcgggccgttctcccaatcgcacagagcagcgaccgccggcccctggttgaacgccgtcatcatccattcgacgccgcccgaaggccggtataccggtctgagcgtcgaccagaacgcgttgcgcatgccatccaggttgctcaggttgtcggggtccatgccgagcagggtctcgatcgtggccacatgccatgagccgtgcccgacgagcatcagggtggtcggctcatcggcatgctccgcgttgatgccgcgcaccaggtcgagcaccgcatcggcgccgcgcagtcctgtggcggtgcggctctccacgccgaacgcgagctcgccgccggtgtggacccgccacgaatcataggcgtcggcatgctccgctcgaatctcgtcgcgggtcatgccctcccactgcccgaagctgcgttcgcgcaggcgcgcgtccgcggtcacgtccagccccagcatatcggcgaacgcgtgcgcggtctgcaacgcgcggaacaggtcggacgagacgacgaccatgcgtcgcgaggatgcggggacctgccggtattcctcggtgtcgctggatttcgccgcccccggccccggctgggccagcgtatccggatgccgggcgatgttggccaccttcgcccagtagtagcgtcgcgcaagctccgacgcgctctggtcggcctgccactggccgatgatgtcgaggggcacgtcgatctgcccctgcaaccgcctcgccacattgaaggcggtccgtccgtgccgcagaaacaccacttcgtcaatcatgttcgtccttaccgtcgccgcatgaatccgtgccatcacacatcctacaggcatcgacctatatccgatcggctgtaacgccgatggcggaatgcgtccggcgtcacgatgcacccgcgactacagggatatcgacgggaccacggccgccgggcgctcgtcgatcgcggacagtccgctcacatcggacgcgtagaaccgcgtgaggtcggcggtgaacttggcgaggctcgcctcgctgctgtagagcatgtgcccggccgggtagtaggcgaaggccacgttgcggcgcagcggcttcggcagcatcaggtgatcgatgtcgtattcggtctggaagaacggcgtgcacaggtcgtagacgccgttgccgagcagcaccttcatggtcggctggtgcgcgatggccgcggccagatcgggcagcacgttcggttgggtcatgacccagcccgattcgccgggcatccggtgccaccacatccagcccttgcccggctcggtggcgttccagtcgaagtcggcgaagcccttgcgctccggcacgcggtcccagccgagctcgtcgcgcagataggcgttgcacaggctcgaatacgcggggtcgagccaggcgtcgtcgacgacgaacgtctcctcgtcgttcatgcggtcgaggtcgtagccggcgacgcggccatcgtagcgtccgacgatcttgtcctcgtcatgcagcagcgccttgcggaacctcgggtcggacacgcgcagattggagtcgtagacataccgctcgtccagtccggtcagctcggcgtatcggcgtgcgaccttatgccgggtctcgtcgtcaagcgagtccccggcggccagggcgagacgcagcggccccgcggcgaaggcacgggcggccttcagatgctcgtcgagcttgacgtccgacgcggctcggccgtgatatttcgccacggacgcataggacgggaaatatccgacgtagaattcgtcgatcaggtcggacgtgaacgtgtagtcgagcacgttggagatgagcgtcagtccgttcagcgccacaccgtcctgctgcagccggtatgcgagcgccgcgccgcgcgtggtgccgtaggattcgccgagcacgtatttgggcgagttccagcggtggtgtttgctcaggtacgccctgatgaacgcgctgaagccggcgacgtcgccgtccaccgaccacagttccggcttggccgcgtcgaggatctcggagaatccggcgccggccgcgtcgatgaacacgaggtcggagacgggcagcagcgtgtgcgcgttgtccacgagcgcgtagggggcggccggcaccggagcggcgtcggggacgttgatgcgcttcggggcgatcgaacccatgagcaggaacgtggtggatgagcccgggcctccgttgaagatgaacgtgaccggtcgggccgggtctgtcttgccttcgccgttcacgaggtcgaacgcggtgaagaagatgctcgcggccttgggtaccttcggtgtgtcgatgagtatcgtgccgacggtcgccgcatagtcgagttcgccgccattgacggtgatgctgtgtctggtggtgtgctcgcatgcctccggcagctgcttgccctgggcgggtgccgccgcgacgggtccggcgttgccggcgttctgggtgttctgggtgttcgtgtcgctcatatctgtcgctccttggatgtcagtgcaactatacgccggccgggcaggccgtcctggatcctggccatggtttgccgcgtcatcggcgccgcctattcggcggcgtcatccgactcgacggtaccttccggctcatctgcgccgtccatctcatcgatgccgtccagtcttgcttcgtgcagcgtggtgtagccggtgtcggggtccttgcgggtcacgtatgccttggtggagacctccagtatctcacccgtcttgctttcaggggcggagacgatgacctggaaacccagtctcggcagtacggacagcgcgcgccgcgtataccggccgtcggccttgatgagcgcctcgtcaaggaagagcgtcgtgtaggaaggcttgagcttgttgtccatgccgccgccgagcaggtagatcagcgccgcgccgtacacgaacgaggtcagctcctgcagggcgccgccggaccgtccgccggtcgaggtgatccgttcgacctgcccgtccgagtggcgcacgagcgcgtagaacgaggatcggcaccgcgggtcgaggttgcgggcgccgtagcttttcacgccgttgacgtccctgatctgcccgatctcgcggcgcagcatgtcgatcatcgcggcgcaggacgcgaacgcgcaccgggccccgtcaagatcgtcgtccgcctgtgccgccttgcggtcgttgagggtgccgatcacgcgggtcagggccgaccagaacgcgcgctcggggcgccgcacgtccgcgtgcagggacaggctgccgtggcgcgggccgaactgctggccgtccagcatcgcgttgatgcgttccagctggtcgtggatgtctccggcgtcggtgtctatcgcgcgtttgatggtcaggaagctcatcagcagcttgtcgaggcagttgtggtattcgacggcggtggcttcgacggtggcgagcttcgaaaggctttccaactcgtcctggtaataccggtagtcgtccacgctggcggcgatcgtatcgtcaccgcccgcatacatctcgatataggcgcccatccgcgcctcgacggcggtgcgggccgacgccgcacgaccttcgagcatggagacgcgcgcctccaggtccttgccgatgccggcgatgacacggtcggcgaaggtatccccctgagccatacgctgcggcgcccccgcgccgatgatcatgtgggcgcgggtcgtcgcatcccccagaccggagagacgctgctcatatgattcggcgagcgcctcctccacctcgtccgtcaggagagtccgtccgttcgtgacggcttttggcgaaatgtccgccgcttccccatcgagcggccgcgtctgcggctgcggctgcgcggcatgctcgtcgagccatgcctgcgctgcgttcaccgcctgatcggcgagctcggcctgccgttcgatgtcgatgcgctggcgctgcgagcggtcgagctccttggacagcgactcctgcaacgtgtcgagttcggcgagcttgggattgttcctgaccgaggcgatggtgcgttcgatgtcggcgatcgccgccttcgcgctgttctcgtcgatcttctcccatgcggtgtatgcgagctggtcggcgagttcgcgctctcgctgcaggcggtcggcctgttccttcgcgctcgcgtacgattgcgcggtctcgtcgcattggcgttgcgcgtcctggatgcgcgtgcgcagttgcgccaaatagctttcgttgacgaatccgatgacctgctgacggtccttgatgccatgctggccgcgtttgccggatttgatctgcccgtcggcctgcacctgccgcacggcatggtcggagtcgtcgatgccgtcgacgcacagggcgtcgagacgctcggagctggtctgctcgcgcagccagccggcgaacggggaatcctcgcggtagcgcagcttcgaggacagccacacctctccgtccgtcccgccggtcgcacccgtgttcgcgccgccgggcccgttcccggctcccccgcgttcggtgtcgacgaactgccaagtgcgccgcgccatggcgtgcgggtcgatggcgctgaccttggctgcgaatccacgctcatggcgcttgtcgacgaggatggtctgggccatggatccgtatgcggcgttcatggcgaggcgccaatgctcctgatcctcgcgcacgtccatgagctccgcgacgtacggcagttcgctcgggcccagcccggtggcccggcacagcatggcgcgggtctcgtccatctggcgggagatgcgggtgcgctgcgatttctggcgttcgtaatcgtcgttcagccgctgcagcgtctgcttgacggacgcgtgcgcggcgtacgtctggttgcgcatgtcgtccagcagtcccttgcgctgctcatatgagcgcatgaacgtcacggcctcgatgcgccgctcgtcccacgcgtgctcgtctttggggaactcctcgccggccgcctcgaacatgcgcccgatgcgctgtctgccggcggtgatgtccgccagcgcgcgttccgcctgccgcatttccgcgtcgagccgtgtcaggtcgccgccgtcgaggcctcgcatgcgctcgcgcaccgcgtcgatgcgggtgcgcaggctttcgatgcgcttgccggcagcccgcgcctcactgcgtcgctcgtcacgcagacgcctgtcgagcggctgccgttcgttgacctcgccgatcatgcggcggatcgcccatgctcggatcgtcgccgagccggacttcgtggccgggttcaccgcgtcgaacgagtggaccgcgtcacgggccgactcgtagtcgccatagctggcggtgatggcacgcaacttgcccatgcgtctggtcttttcctccatgcttcggaagttcgcgtcataacgctcgtaatcctccacggtcgcacgggccaggtccagcgcctcgggcacgcccagcacgccctgtttgaagatgtcgtcaaggcgggagggggcgtcggccgactggatgcgggccagcagacggcatgcctccgcgctcaggcccatgacatcccaaatgtgggtgtggaacgcctcggcgttcgggaaggtgacgcaccccggatacgtggatttcagctgcgtgggcgtgaacggcgactcgcggaacacgtccatgcggcgcgggtcgatcggcttgtcccatgccaggtacagccgtcggacgtcgccgcgcccgtcgccgggcatcagatagaggaacttgccgcaggacagtatctgaccggtggtgaagtttcggtaggtgtcgacgatcgcgccccatatggaccggggcacgccggactcgtcccggccgcgcaggtacatcggttcgtcgacgccgtcggagcctcccacgccgatcatgccgcgcaggtaggtgtagtcgcttcgttccgaacgccccgaattcgacgccttgttgaagggcgtgccggtcgggtagagcagcgatatctgcgcgtcgaccagcgtcgacttgccggattcgctcgcgccggcgagcaacgtcaccggcagttgcgggtccgtggagggacggaactcatggtagccctcataggatccccagttgacgagcctcctgctttccatcatccatcggtcggcgatcatctgcatgtccttgccgctcatcgtcactccccttcccgtgcagtgccgccgtccgaggcggtctcgtcgtcaatgccgctgtcgttcgcgccattggcatcatcggcgcccctgatgtcctcggcggcgtccgcatcggcgtcgtcatcgaacagcggagcctcgaacagttcggcgtcgggtcccgcatcgtccgaatcgccatcgtcatcggcgccgctcgcatcggcgttcgacgtatcgccggctgcagaccgcgagccggccggggccatgtcaccggccggctcgccatcgtcgtcccggtccgcgactgcgagccagctgtccgccagctgacggtccagcaccaccggcaccagcggcgtgatgcggtacatcgtctcgtcatcgtcgagctgcctgagatagccgtacgtgcacatgacggacacgatcgcgcccacctgcctgagcacgccctcctcgtcgttgcgcgaggcgaggtacccggcgccggtggcgagcgccgctcggatctcctcgaagctgaccagccattcgtccggcgcgacgtgggcgttctcgtattcgagcacgcggatgcgcaggaacgccagcagcgccgcctcctcacgtttgaggctcgcacgggtcttgagcgcgcgcagcgtcatgtccggcccgctcaccgcggtggcgtacatgacgcggtagtgctcgttgacgaccagatcgagcaggtcgttgttgagcgaacggatgaccgccgcgcggttgtcgagcgccaggtcatagaaacgtccgctgatgtagcgctcgcgtttgagcatgatcgccaccatgcgcgcgtcggcggtcatgtcgcccgtgtcgccctcgaacagggcgtatgggttgaccgcgccttccgcgtccgcgccatcgtattcgacgtccgccgcacccatgtcatccgcgccggtactggcactgtcggtatcggcactgccggtatcggcactgccggtgccggtcatgtcgtcgccaatcatgtccatgtccgcgtccggctgggcggcgtcgttcgtcaggtcgctcatgtcagtcctccttcacgatgtcgtgcaattcatcctcttgtgcgagcactgggccggtgatccagtccctcgggcttccgtctgccgatatgcaatgccatgcgacgccggctccgtccccgcagccgagctctcccaggaaaccgacgagctcgctttccttccgctcggctttcggcagcccgttgaagctggcgacgatgtcgatggcgccgttcccgtcgtccgcgtagacgggcgattcgaggatgagcgcggccatgcgccgcagccgcggtcccccgttgtcgatcatcgaacgcaggtcgggcgcggtcgcatcgcccggtgtctgcggtacggacaatcccggggtggtcgttcgtaccatcgggcgcgcggggcgcgacggcagcggagggaacctgccggccgcggtatcggtccggtacggtctcgcatcgtcgccctgatgcgccttcgcgtcggcgttgacgtgggcatacagacggttgagcttgccgagcatcgtgcggtatcgggtatcggtctgctgtcgcaccagacggctgatcgcctcgtcggatacgcgcatctggcggcgcaccgcctcgatgccgtcatagatgcgcgaaagctcggcacgcacctgatcgagcagggcaccggactcgccggccagatacggcgtgtgggcgatgtcgcgcagggccgcgtcgatctgctgccgtccttcgtcggtgatgatcacctggaacgcgtcctcgaagcgtcttccgctgtcggactcgctgaaggacctgcggtattcgtcgtggtacgaggtcaggatgtcgtcgacgctcatgtcgcccgcctgcatgcggcggcggagcgcgtcaccgttgtcccgttcggtcagcacgagttcacgcaggtctatgggcacgccgcgcagcgtgttgtgaatcactgcgatcacgtcctcgacctgcgattcggtgagcgccgcctgccgctgaccgtggcgtatctgacgtatctcgtgtttgcgcgccttgatctcccggttgagcaacgccacgcgctcgccggggtcggcggtaagctgcatgcgcgcatgctcgatctccatgatgatcgagttcgcctgcgcgcccgacagcgtgcgggagtcatcctcaagccgcgacagcgcctcgatcgcacgatgggcgcgggcggtgagacggtacaggaaccggtgcgacgcggcgtcatgcgagttggcgagccatgcgtaatcgtcatcgccctcacgggtcaggtcggcgaggatgcgccgggaggcgtccgcgatggtctgatcctccctgagctggtattcgccggagtcgacgagccgggacaggctttgcgagaagctttcctccagggtctcacggggcagctcgccggtcaacgggtcgaaggccgcgcggagcagcgccacgtacatcatcgaattctgacggagcagcagtctcagcacgccggtttcatagaccggcctcagccgttccatctcccgtcggatatcacccacgaaaggcctcgctttccactcgtcctggctcggcgcgcgtcacgttcgccggacaaaccacgctagcacaagacggcgctatcggcgtctcccgtcgcgtcaccgtcacggagaacgcggccgcggccactggtacgctcactgcacgagaccgcgcagcagggcgatctcctcgcgatgcgtggtctcggtcagttccttggtttcgaggatcatcggcaaccgtgacagacgcgggtcgttgaccattctggcgaagaacgggatgccgaggcggccgtcgccgatgttggcgtggcggtccttgtgcgatgacaggccgaactgggagtcgttgacgtgcaccgccttgacgcgttcgagcccgatgacgtcgtccagctgccgcatcacgccgtcgaagtcgttcaccagatcataaccggcgtccagcacatggcacgtgtcgacggtgacgcccacgttcgccttgtcatcgacgccgtcgatgatggtcgccagctcctcgaagtttcgcccgcattcggtgcccttgcccgccatcgtctccagcagcaccatgatgcccggctccagcccgaacacgcggttgaggccatcgctgatcagagagcatccgcgatcgggcccttgccccacgtgcgcgccgggatggatgttgatgtatatctcctgcccggtctcacggatcggcgtcagcagtcggatgtcctcggcgagcgcccgtatggcgaactcgcgcttgtcgggatccttgccggcgaggttgtagacgtagggagcgtggacgacgagcgggccgtaatgctcggccgtcaactgccgcgcgaatgcgacggccccggacgggttgagcgccttggatggccgcccgtacggcgagcgcgggaagaacgcgaatgtggtgccgtgttcctcatgcgagcgtttcagcagcgcgctccacccgcctgccgtggacaggtgcgatccgatatacagttccttcatccgtgttgtcccttcattcgtatcgtttcccggcgatggttcccggctgtcgtggcgggtcggcgccgttttcatttcgccgcagtcgcatcctcaagataatcgcgcagcaccagggcatgattgacctgagggtccttggcggcgtacagcaaggtcacgtcgggatactccgcgcagatgcgcagcagttcctcggcagcagcgttggcatcgagctccgcgatgtattgggcgcgaaattccgcgaatctggcgggatcgtgcccgaaccacttgcgcagctggggagagggggcgacgtccttcatccacaggtccaatgccgcgcgctccttcgtcatgccgcgaggccacagacggtcgaccagcacgcgatacccgtccggcgcctccggcgactcatatatccgtttgattgcgatgcccatgcgtcccatgattggcttgcgcccgcgggatgtcaagcgtacataacgcaacgggatgccaaaacttggagatacgaccgttttcggtgggaaaggccccctatctgcgagttttggcatcctgccgcacgacccgccccccctgatacggtgttaggtgttatccttgcccgtacccgacgggcaaacgaacgagaggaatcgccatgaacaccatcgagaccgaacgactgctgctgcgcccttggaaggtcgatgacgcggctgaggcggcatcgctgttccggtatgccagcgatccggaaatcgggctgagatgcggctggccgccacacaccagcgtcgaaggcagcatgcatgacatacgcaatatcctcgcggtcgaaaacaactgggccattaccatcaagggcggcgcgccgaacagcaacgcgcctgtgggcagcatcgcgctcatgcccgtcagccaccgcaccgccgacgccgttgccgccgatcctgaactcaccaaacgctacggcaagtaccttggcgacaacgcgctggaagtcggatactggatcggccggccgttctggggtaagggatacatgcccgaagcattgaccgccgtgctcggctacgccttcgacacgctgcgcaaggacgcggtatggggcggccacttcgccgagaacacgcaatccgagcgagttcaggccaagtgcggcctgcacgtcgtcgccgagtcgaaacaggattactacccgctcatcgaccgtcattatgaccgcgtctaccgcatcatcaccgcgggcgaatggcgcgatgccgaacaccggcagatggcgaggatgatcgcctgattcacgaacgggcgtctctgccaacggcatataatgcaagacatgacaacccgcattgttcccatcgagccgcagtggttcatgcagaaggccgaagtccaatcgcgtacatggcgcgagctcaatcaggggcatatcccgcaggacatcgtggatgcgatcaccccggcattcgcactcaagctgacccgtggccacgccgccgaccccaaccaggttgtgctgatcgcgttggctgacgaccgtgtggtcggattcatcgaactgctgcgcactccgcggcccccgatcaatcggcccgaggccgcggaactggcgtcattgtacgtgttggaatccgagcatcgccacggagtcggccgcgctctggtcgaagccggacggcaggcagtcggcaacgaccggctcgtcttgtgggtcgtcggtttcaacaccaacgctcagggattctaccgacacatcggattccacaagaccggactgacccagaccgaggatatggggccggaactcgaaatgatcaactactagccggccgctggtccagctgtcgttcaagctgctgtgcaagacgctgagcgtgaatgcgagtggcctcgttggcgaagtctgcgcacgccttgctgccgtacagcgccgctccacacggatcggcaaagcgtgggtcgccgcacagagcggagcggacgacgccgagcgtgtctgaaaacggcatggtggcctgttcttccgcatcctgcggcacttgggccttggcggccttagccttgatgttcttgtccataatctgcgcggccagccgttgcgcttccggcgaatccgacgtgactcccgtatcgaacaaccgcctccattgctcggcatcggcgagcatggaatcctgcgactgcctcagtcggctttcgcgaatccgtgagagccgactgcgctcctccgcatccagccgcgcccatcgctcggcggccgcgacgctgccaacaggatagatctttacgcggcgtcaaccgcaagacacgacacgcgacgagtcgaaagattttgccgttctcccccgatccaggacgagaacaccgaacaaatatcattcccctcccggcatgaccgacaatcagatcatgcggaccgtaccacaccaggccattttcacccgaatatgacgtggtgtggcacgcggcggaataacggcgaatgacggcgaatgacggcgaatgacaaaacgttgcaaaatggcggttccgataaatcaacgctggccacaccagcgaatgttaaggaaaacatcgcattgtgtggcagaaccgttgccacacaatgccgatctgggtcattttcgcgctggtgtggccatgcgctcctcattcaggtctcagcgtgacaatactcgcgcacagtgatgggattcactcgaacagcgtcacccagtcggggtcgcgatggccgcgcgagtatcgagtttcggcgtcgggtatccggcgctgagcagccggcgcatctcttcggccggcacgtcggcctgcatggcgagcatgtcgaccgctatcgcgcggatgcgctcgtaacgctcccggtcgaagggatccttgcagtacgccaatccggtctgggccagtgcctgcagctctctggcctgctccagcaacgtgcggcctgcggcgatcatggtccgtccatcctcccatcgcaaggtctcatatccgtctaagctcagccattacgacgtaatcgaccgtcagcatgccgattcccgactcagtttccatcatgcgtaccactcgggccgtctcagtcccagaaacggacgccgtttgcgagccaccgcggtctgagagatcaatgtcggcaatgatcagtcgctcttggccgtcggcctcgctgatgacgttgccgtacgaatccactactactgatcggccggcgaacgtcacgtcgccctcctcgccgacccggttgcacatggcgatggtcgcctggttctgcataaggaggatgccggcaaggatctcggcatcctcaacctagccaccacgctcggccaggcggtggggccctccatcacctcggcggtcaagaccgtgaccggcacctttacggcggcatttgccatatccatcgtcatggccccgtgcgcggtcggcttcgtgctgagccttcgaaaagtgcgatagccgtgacggcttggatgagattcgagaactacgttctgatcacgccttgccacccatcatgtcaatcgtgtgcccgtcacctgccattatcgtcgaaaacagcaggcccggactgactgtaaggtgattgagcagctggacatcagcttcggttcttaaatcacagcggcttgacgaaatcctcgccgttgaaacagccggcgatggcgttgcattcgacgacgagtcgcggatcgatggcgagcgtatgatatgaatcttcgatcgccgtctcatgctcgatgagctcggcgcgaccgccatgcgcggcgacaaattgcctgatcacctcatacttgctgttcatagccgtctgccgtcttgtttgccattgagtccaacagtcgcacgaccttgaaatgctcgaacaccacaagagagtcatcgttcagcggaaaatccgggtcagcgaactcgttgcggtattccggcgcgttccagaaggactcgtgggtatgcctccacgcggcagccgtggtgtcgccctcgccctcatcgatggcgtgccggtcggtaatcttcccaagcggaataacatcaaccgcggtggtgacgagtatggccaccggccgttcactggaatccaccagtgccgagcgttcgccgacctgcggcagcggttcatcatcctcttcgtattcaatcatcaatgcggcggtcgcggtcttcgttccggcaagaatgagccctaccagacggtcacgttcaggtccggggaacatgaattccgccttgggcaggttccctggttcgggtgccgtgctgatgcgtgtatagtattccagcccatcctcgtgatcgatgcgagccccgcaatgctgctgcaccgcaagacttgcccggttgtccttatgaacgctcaggtacgcctcgtcaatgccgagctcacgcgccttgtcgagcgtgagccgcaagccgactgtggcatatccacggccgcgatattgaggggcgatgccatagcctatatgcccggctccgacacgcagattgtcgttcaggcgatgccgcaaattgaagattcccacatacgcaccctcatcattgatgagaacgtacttgctgctcggcacccagccaggctgcagaccgatgccacgcgattgttcttcaagctcatgcacatacacggcgagccgctcgcggtccatgccggccgcctggttctcgaacccgttctcgtccgccggaaactcagagaacagctcaaacgtccgctccggatccgcccgccacacttccgtcaaccgcattctcgccctttcgtttccgccatactagcccacccggataacagggtgcggacgttttcttggagactgggcgaaaggatatcatatgtccggtgccgggcggcatgcggcggaagcgggccgccgaactgttcggcgcgggcaccggcctgcggcgcctgtcggacagggagaagaccctgttgatcgaccggttgaggccggcgtgttcgctcggctcgatgacatgcttgcccggcatcgcgccgggcggccgaggcgttcgccgcctccgagggcgggtacgggtaccgcagggtcaaggccatgccccgaacccgcgtctcggagaaggtgctccgcagccccatgccataacctgcaccgtccaagccggcgaaaaccacaccatcatcaccatcgataacaccaccagacctccagaaaacgccgcgaacgcagaggacctgatccagccgttccaccgcggcgacgacacccgcatggccaacaggcccgggcacggactcggcctatccatcgccaaggcatgcaccgacgccatgcaggccacgctcgccgtcagcaggccctcacccggcaccttccgaaccgaaatcaagctaccgaacaggccgacgcagcgctattgcccgcagcagaaggaacatggacaccaccctcatgccgggcaataggcataatcctcctcattcagccccgtttgcatcgtccccgcgacgtgtgtggcggtcgcaattagacattctcggcgcacagattcttatcgtagactggacgaatgtgtaaaagattcgcgctcgatctggattgggacgccatcgcggcgcaattctcggtggccaaggaagacgtgcgcggcgacgttctcccccgcccctcgtacaacatcgccccaacgcagaacatcgccgtcatcgcgcagggcaaagacgggcatcgacacctgaccggcgcatactggtcgctgattcccagctggagtcctggcaagaccctgccctaccccacctacaacgcgcgagtggaatccgctcacgtcaaatccaccttcgcggaatcgacccgctcccggcgcacgatcattccggcgtcggggtattacgagtggaaggggcggcgcccgttctatttcagcccggagatggaatcgacggcgcttgcgatggccgggctgtattcgtggcggcggccttccgcggcatccctatggcagctgacggcgacgattctcacgtgccctgcggtggatgggccggcgacggtgcatgaccgtatgccgctgctggtgccggccggtatgacgtccgagtggctggatccttcaatcgacggcgcccgtctgctcgcgccgatgcgcaaggccggtgccgagctgtccgcgcggctgcatttccatgaggtcgctccgccggagggcgacgggccgcgcctgatccgtccaatcaaccgcgaggagcccatgcggctgttctagttctgccgcagatcggcgcttcttccccgatacggttgagcgcacggccggcacgggcagcctccgccgacaggctgagccgcggcggacgacggagccgcgtgtagacgaacgcaacaggcgtttgcgtccttaagtgcgcgccgaaacgacgaccgtgcgcacttagagacgcaaacagggccatttgcgttgctatgtgcgcgcacttgccggttcggcgcgcacttaggaacgcaaacgcacggaaaccgcgactcatcgtcgacagcccaagccgactccgccattttcaccggcccagccggcccaaccaatccgtcatcttacaccggcccgaccaacggtgggcatataccctgagcacaggaacattcggcgaaagccaacggagggggtcatggacgtgtcggacgtcatcgcgcggcgggagttcatgccgacgtacatctggctggatgtggcgtttctgattggtttcgcggcgttgctggtgtggcaccgcaaatacatgacgctgctggtcgggctggtgatgggcggcgtgtatttcgccgtgggctatggcgcgttcaatctgctgacgcattcacgttcgatcagcggcggcagcatgttctgggtgctgctgtggatgagcgtaagttatgggttcacgaacttctcatggctgtggttgtggctgagccgcgaccgccatctggcggaatggtcgatactgattctcgtctggtggttctgctgcccgttgatgtcgcagacgtttacggcccggttcgcgtccggcatgcagccgattgtcatccaacgcacgaccggcgcgtaccacgggtggatggccgtcatcctgtcgcgcaggcgtatggtcggtcatgcggtgtgccgccgatcggcatggatacctgccgatcaggctcgggatcgtcgaagatatccgaaacacctgatgtacgaacgtaccagcatcagcccgacgctgttgtacagtcgtacaacaatcgttcgcaccgcctgtcagcgatggttttcgaaccatcccgcccagtcgacgacggcctcgatgttgttgccgtccggatccagcacgaatgcggaatagtaccccggatgatacgggcgcggtcccggagcgccgttgtctcggccgccgacggcgagcgccgcggcatggaaaccccgcacggcctcacggttcggggcgaggaacgcgatatgcgtgggcggcggcgcgagcgcggcatcatccagcgcagacacgtagaagtcggagtgcggcgtcccgtcatccacgccgaaacccaacgtgggctcgtggtgggccttgacgatgtagccgagtggcgcgagcgcatgctcgtagaacgcgatgctgcgtccgacgtcccgcacatgcaatgtgatgtgatccaacatacctgccactgtacgcgcagcataagccacatgacagcagtatcctatccgcttgttatccgatatcatccgcccaaagtcccatctcgggcggagcaaatgggactttgggcggatgatggggcgcttcgcgggatggccgggacggcggaagacacgacggccatggcaacgggcacggcaaacggccaaggcaggcaggcggcagccacggaacatgcttctcgccacgccccgcacaaatcatcctgcgggatgccacggcatcgcagcatcatatggcacgatagacacgtaacgacacgcaaaacagatacactgcgcggaaacgactctggaggtgagcagatggccggacgacgaacgactcggcgaacgcgatcagtctcgcctcgtgatgggcaaccgccgatccggcatgagctgtcgccgacatggcacgcacgacccgccgcacgtcgggaacggccgcgtcacggcatgcgacggaccgtgatcatcgtcgcggtgatgctgtgcgcggccatcgccttgttcgcctcgattccacgactgatgcgcttcgtatggcccgcttccggccctgaaccacgccgggcgtcggacgcctactgctccgcgacgctgtcttccggcgacaacaaggaaatgctgtccgttgaacaggcattgaacgccgaaatcatcacgagggcggcagtcaaacggggcctgcccgatcatgccgcgaccgtcgccatcgccacggcgatgcaggagacgcggctgatgaacctgagctacggcgaccgggattccgtgggattgttccagcagcgtcccagtcaggggtggggcgcgaaagagcagctgatggacgagacgtatgcggcgaacaggttctacgacgagctggtcaaggtgccgaactggcagtccgtccccgtcgaggacgcggcgcagtcggtgcagcgttcgcaatatccgggcaggtacgccgactggaccaatcttgcgcggacatgggcggcgggtctgaccggcgagaccggcgcgggtgtcgcgtgcgcgctggagccggcgcagccttcggacgcggacatggatggtctgaccagtgatttccgcaacgaattcccaaccgtcatggtatcgcagccgtcgagtctggagccttcctcgaagacgcaggacgacggcggcgacaaggccgccgacaattccgcggccaatgacggctcgggcaagaccacgtccaagacactgacgttcacaatgtcggccggaaccgacaccgaaaacgggaaaaggctctgccgccaagcgacggcctggctggtggtccatgcacggcgctacggcatcgattcgttgcgcgcgaacggcatgcgctggaaccgcacggacggcgtgtgggccggcaccgagaccggagatctcaccatcacggcgacgctggcctgattccggccgctgtcatgacatccacacccgccgcccggctggtataagacacctggttccatctcacggacagcgcgcacagtcaacccgtgcgtgcagctcattcgcacatcgccggcgagtccggcaaagcgagacgctgcgcgacacgcccgaattgcgtagcagaactgcaagcacgcatcccgaaaaacggcctttttccgtcattcccgcagaacatgtaagacagtcctgctacacaattcgggcgtgtcgcacgatgaaccccgtcagtcactcactcagcgacccgatttcgccgcgcggatctcatcacataggcaccgatcggaacggtcatcagaacgccgaccacgaacagcagacgtacatcgaccacatcggcgagcgggccgaacacgagcatgtccgcaggcactccgaatgccgagaccgaggtcagcagacccaatactcgcccctgcagggacacgtcgctctccttttgcatgagcgtgtacatgggcgcggcaagcctgtcagcggaattggagagcacgacgaaaccgaaatcgatgtggcgcgcagggcgtcatccgagctctcccccggacgacgaagacgggcatcatccaaacgaatcaacgcgacgaagcctatgccgacaatcgccgtggacacgtcgacgagcatgatcatccacaatggcatcaggttgacgagggctgcggcgattgcaggagaggcgatgctgatcgccgtctgcaacgtgccgttaatcgcgttgacgcgcagcaaccacgcctccggagcgatctgcgggatgaacgattgcacggccggggtctggattccgccgcctaccgaacgtatgaccagaacgacaagaatcagcccggtatcaccccagccgacggccatacctgccgacaggcatatggtcacggccgcgataacggcatcgggaagcatgaccgacagtttgcggttccatctgtcagcctagacacccccgaacacggagacgattgcctgcggcagggcggcggcgaccatcgctccggtcatgaccatgccggagttcgaccgcaagaccaggtaccagataatagcgtattgcacgacgctggagccgaacagcgacagcgtctgttcgacggtctgccgtccgatacaatgcatcacagggagagccgtccatgtcgttcttgttccgacgccgcgatcctggatcacggcatgtctaccgctacgggccgctgcgcatcacgtgcgtcgacagggacgtgccgatcgacgtgcgcgtcaacgcccatctgatgtacaaggtcgtgctctcttgggaggacaaggcccgatgcgccacgccgttcgacatgatcgcccgtgatctcggcgagttctggctactcgaccagtggtccactggtaggcttgcacggctggacccgttcgccgctcaattacggttcgagcagaaccatcctgcgactgttcaccagcgcattcttccatgccgcccatgcccgcaggccacggtatgtccagctgctcgatgagcaccgacacgccgcccgccaccgggcgcagcccgtcgccgatagactggagcgatgggcgaatcgaagaacaaaccgccgttgcgcgcacgctggaagaccatggaagccgccataggcatggagatccgggagcacaaaggctcgttcgcggtgtatgtcgtgctgcgcgtgctggtgatcgctgtcgcggtgctgaagttcttcaacggcgactatgaggccgtgttcctgtgcatcctgacgttgctgttgctgctggcgcccgcgttcgtccaagtacggttccgcatcgaactgccgtccgcgcttgaggtcatcgtattggtgttcgtgttcgcggctgagatcctgggcgagatcagctcgttctatgagatcttcccgttctgggacacggtgctgcacacgatgaacggcttcctcgcggccgccatcggcttttcgctggtcgacctgctcaaccgttcggaccgtgtgaagttcgagctgtcgccgctgtacctggcgattgtgtcgttctgcttctcgatgacgatcggcgtggtctgggagttcttcgaattctcgatggacatgctgttcggattcgacatgcagaaggacgccgtcgtgcattcgatcagctcggtgatgctcgatccggcccacgccaatcacgccgttcatatcaacgacatcacgcaggtggcggtcaatgggcgtgacctcggccttggcggctatcttgacatcggcctgatcgacacgatggaggatctcatcgtcaatttcatcggcgcggtcgtgttctccgtcatcgggttcatctatgtgaggaaccgcggcaagggcgtttccgtcatcagccggttcgtaccccgacgcaaatcccacgaccgcgattacctgcggcttgcgggcggcgacggcgatgcgtcactcgcgccgggagcgcaggctcatcaggcgcaacaccagtcccagcacgatccacaccaccacgatcacccatgatgcgggtttgagcgcggccggggagaacggcagcacctgcaatccgatgatgacgagcccggccgcgatggcgagcacgatgttcgccgtcttcggcttgccggtcttgcggtcgatggacgcgaagctcttgggcaggtagccccgccctcgcgactgggcggattgtgtgttcgtctacgcgctcgcaggtctgatcggcaccgtgcacaagaccatctgggcataccaggccaaaggcatgttcgagtaccgcaacggatcgatcctcacccccttcaactacgtgtacggtctccgcgttggccatcgtcatcgcgctgcgccgtatcgacctggggtggaaggtcgtgctggtcggcggtctcgccggcggcatgctggagttcgcgatgagtctgatccaacagtatctgctgggcagccggtcatggaactatgcgaacgagccgctgaatatcggcgggcgcaccaccgtcccgttcatgctgttttgggggctgttgtgctatctgatcgtccgtttcatcctgccgctcgtcctgtggctcgtgcatctcatcgacgacacgtggcacacgcggctcgcgaccatactgctggcgtggattctcatcgacgccgttggcgcgctgcccgcgatcttcctgtacgggcagcgcgccaacggcgtggtgttcgacaactggttcgcgcagcatatcaggcggctttcgatgacgacttcatgcgcctgcatttcccgaacatgcgcgtgtgagagccaccgcgggtcgagcggcaccatatatcggccgccggctcgttcggcggtgatggcttatgggcgtcacgccaggctggcgcccagttgacggatgccttcgagttgggccgcggcggccttacgcttgtcggacgaatcgtcgcccatggacaggttgtcgacgtacaccagctcgacgtccttcaccccgcagtacttggcgaaggtctgccggcagatctgattgtccaacgactcgccgatgccatcggactcataccattgccgcgagccgccggtcagcatgatgacccgcaccgtcttgtccgcgagcgcgccgggggtgccgtccggatgataggcgaacccacggcagatcacgcggtcgaacagtcccttgaccatcgccggcatcgtataccagtagatcgggaacaccagggcgattacatccgcctgagcgagccggcgctggataggcacgacgtcctcgggcatcggggcatggccgagataatgggcccggtcggccgcagaatacacgggattgaatccttcatcgtacaggtccagcacgtccgccgacgcgccgcgctcgacggcgcccgccgcgaatgccgcacccacggcatccgtcatgctgtccttttcggggttgctggtgatgacaagtatgttgttgctcatgattccattgtcccggaaagctggaccgacgacgtggcgagtgacgtcagatcaagtcgtacggcatctgtctgcggaccagccagaacacgcccatgaccaatatcaccgtgcccgcccacggcacgcgcccgcagaacaccacgcagcatatcgcggcgaaccgcgccgcatagaacgccacgcggcgagcgccgctcctcggcgtggtctcgcaggtcatatgcgtgtagctgccgccgagagtgcggccttgtctgaaccacggaatcacccattcgaacagcaccagcatgaccagcatcgcgatgtccccgaacccgagcgggccgagcagccgcatccgctgcacgtcggcgccaggacggcccgaaatcatcgtgaccagcaccatcgcggcgacgcccacaggggtcgcgcacaccacgaccagtcccatgtcgatgaggaatgccacgaaacgacgcacgaaccccggccgggtgaccgtctgcatatccgtgcgccgcggcgggaacagccggtcgaacagcatggcgcaaccgtatccgatcacggcgcccgacgtgttccatatcagatcgtccacgtcaaacagacgatacgagcagggaaacacacccatcacccccgtcagctgcatcgtctcgacaagcagcgacgcgagaaagccgaccggcagggcgaccgcgaatttccagcggaacacccgtttcatgatgaagccgagagggacgaagaacaccacgttcatcacgatctgcaggatcgccgtcagcccgtcggcgcggatatcaccgatgaactgcagcggattgagctgcggatgcagatggtgggtggcgcagtacgctgcgggatcgtccggcatcggatacagcgtgaagcacagcaggccgatcagatacagcaccgtcgcgtactccgacagcgccgcaccgaagccgagccggttgtcccggtggtacagcatggccagcacgggcacggtcacgatgaacgacaccagcggccataacgccaccgacatcatgaacggcgccgaaaagctctcgaagaatcccatatcgtctgctcctcccctgttggtttcactgtagccgagtcgcaggccgccgggccatccgccatgagaccgatatggacgacgagcgcttaggccacgacgggcggcttcatcctcgggaaggagaagagaaccgcagaaaagggaagcacgggaaacgcggcgagggccggccgggcccgggcgggtgtcctcctcggccccggtgccccatattgtgacgaccggtcacccgaacacacggcgacgggctacagtggggagtagctacataggcaggaggcgcaatggacattcttttcgtgaccagcgatccggcgttggcttccgcggtgaaaggcacgctggaatccgcccggcacacggtgtctgccgcgtcggatgtcgattcgctcgccggcgcatggccgcacggcacaccaatggatctggtcatcatcgacgacctgtccgcgcatgatctgttggatgagaccagacggagcctgtcccggctcatggacggcaagaccggcgacggcaccggcacggccgtgcggccgcgcacgctgctgctttccactcccccgcgcacgccgaaggcgaacccggacgacacgccgcaggtcagacggcagaccccgttgccgacgatccgcaaaacaggccgggccaaggccgacgggcaggccgcccggccggccgcgcccccatcgtctctggacggcgcttccagcgtcccgcccattcacgcggatgaaacgatcgtcaagccgttctcggacgtcgaactgctgtcttacgtgcgcgcgctggaatccggcggagccgcggacgagaccacgctcatccacggcgacctcatgctcgacacgcgcaatcggcaggcgttctatcgcagcggcaagcagccgctggcgctgtctgcgcgcgaatacacgacactggagacgctgatccgggcgaacggcgaattcctcagcttcgacgagctgctggagaaggtctgcggcacgggcatcttcgagcagcgtgacatcatggacggcacgctctactcattgacgcgcaagatgcggcgcatggggttcttcatcacgcagcgggggcatcgttaccgcatccgctgacatcaagccgtcgccggttctccgtcgccgttccgctgccggccgcagccgacagcgttgcacgaaagccggtatcgaaagaccagaaaggcgcggttcgggcatgcatcgcccgaaccgcgcctttctggtcacatgccggtcatcggttctcgccgacgaccggcacctgtcgacggtcagtccttgtcgatggtcttgcctgcggtggcgccggaggacaggtcctggatctcggtgatctcaagcaccgggatggcggtgggcttcttggtgcccttctcctcggcgaccttgacctgggcgtcatagatgtcgtcgtcggtgtgcagggtcacggtgccgcggaagcggtagcccttcttctcggccaggttggcgacggcgacgaccagcgggctgccgtcctgcaggttgcggtagtgctggccggcggtgcgctcgtggtaggcgaggtggttgtcgtcgagcacgaacatcgacatcttcgggccgagatcgaggttgccgtccttgtcgacggtggtgatccacgcgaggttgttttcgatgaacgtcttcatgtcggcggtgagcgttgccatagtgcacgatcctttcgtttggtgatggtcacactggttattccacatatcagcctacttcaaactcctgtggcctcatagcgaaatcagccgactgtgaataatctcacccgcgccgcgcggcgtctcagcccttccacgcgcgcaacacggatttcggcacgcgagacgcgtcccagcggtagtggccggtgacgcccatgcggcgcgagaacgcaagataatcgttctcacgccgccgctgattcatattgtgcagcacgtaggagaacccgtcagcgtcacgcttgtcggagatcacgccgatatgcttgacacggtcgaacacgacgatgtcgccctgctgccattgcgcatgatcgttgacatcgttggtgagggtgatcccgtatttgccgaagaacacgtcgagcaccccggtacggcgaaagtcgatgttggggtcgggtttggcggccaccgacgcataggacgcgcggtccgcggcgatgtccgcatcgaccatggccttgaggtcgtatcccgcgttccggaaggcgcgccacaccacatcgacgcaggcgccgcggtcggcgggcgggtatccgccctggtagtagccgtcgtcgtatgccgggtgcgccagcgcatccttgcgggccccgcgcatgatgtccgtatagtcgtccacaccgttgccgttgaaatccaccgggctggtcaacacgggatacctgcgccgcgacacgtcgggcggcatcaccgtcgtgtcgggctctcgcgcgtgcgagtacatggacgaggccttcacgccgaacgccttcaccccgctgatgatgccgtcgcggcgcgaccatagccatgaacccgccaaaacggcggacacgatcaggagcgccaccatcgcggcggccaccgagcggccaaccgcgcgactggccttgcggccatcatcgcgaccgtcctctcggccttcctcgcggccgtttccgccgcttccgcccgcggcattcccgttcgaaacacgatatcgccgaatcataatcgttccgccctccatagtcgcgcgtcccgcatatcccgcgcccggcgtcgcgggcggatggccgcgcgcggcccccggcccgggaatccgggcaaacgacggacgacacgatgcacgcaggcccgcgccgtggctaggatattggatggaatatgttgggtgaagccaccgtcctcatcgcgacccgtcatcgtcttcattatggacggcgtcgagcggcagcgcaagcctgtataaggagaatatgtatgaacatcgtcgaggcaatggagcggcgccacgcggtccgcgatttcagcgaccggcccatcgatgacgatacgcttcgcgcgttgaatgaggccgtggacgcggcgaacgccgacggcgggctcgacgtccagctggtgcaggacgacacggatgcgttcgggggatgcccgacccattatggtcgcttcaagaacgtccgctattgcatcgccctgatcggctccgacgacgaggacccggcacagctggaccgcaaggtcggctattacggcgagcgccttgccctgacggcgacgcagctggggatgggctcaagttgggtggtgttgcacgagacgcacgaccatgacggacgctggcggctaggcgagggcgagcgcatgcccgccgccctggccttggggtatggcaacagaccgggccgggcacatcgcagcaagcctttggaagagctcggggccgtggagaacggcgacctctccggcgctccggattggttcctgtcggggcttcgcgcggtggcgctggctccgagcgcattgggtaagcagccggtgcgcttcaccctgctggaggacggcaagacggttctcgcgcagcctttggagggcgttcaggccgatatctgcctgggcatcgcacggtatcatttcgaggtcggctccggccatactgatatcgtcgtccgctgattcgaccgggccggcatggccgttctcccgaatcagtcgcacgattgtgcagattcagctataaccgtgtgatttttcagcatttttcgccgcaagataagtcaagttcgagaaggaaccgctagcgtcgttcaacatgaagaactttttcaagggaatttcgctgtcgtctatcgcggcaggcgcgttggcggcggtcacctcgttcctgttatcggcgaaaatcggcatcgccggttcggcgatcggcgtggcgatcggttcgattgtgtcggcggtctcgtcacagatctatcagaacgtactacacgaatccggccggaaactgcaggatgtcgcggggacgacgggcgacggggacgacggcgctacggagactgcggctgatacggatacaaccgcttccaccgacgccaatgcgcaggaccatacagcgatcatcgccaatccggtggcgctgccggcccccgcatcacacgagctcggtcacggtccgcggaccgtcgcctcggacgccgcacggcggctgtcgcacggcgatgagacgcaactgatcggcaacgccacggtggacgccgatgcgacgattgcgagcgggatgccccccgtgccggcgccaccgtcctcggcccgcgccgccacggcaagcggcatgcgcacgtccgcccggcctgccgcagccagattcacggcctccaggtccgctaccttcaggtcagaggccgatcgggcgaagcgcaacaagcgcaccgccatcatcgtcgccgtcgtcagcgccctggtggcggtaggcgcgaccgccggcgtcatcctcgccatcacccaaggtcagggaaccgatactgtggtccgcgactgggtgcgccagtcgaacaccccgaccgagcccaagcagcaggcaccgcaggacgacacgaccgacggcaacagcgacaccaaggattcgacaacgaaggacggcaccgattcgaccggcaaggactcgaccggcgacagcaacagctcgaccaacagtggcaatggatcgaccgattccactcagggcaacggttctgactcctcctcgtcgaacgggtcttccagctccaacggatcaaatggctcgaacgggagcaacggctccgactccaccggaaccggcaacggaaactcctcaggctccgactcctccgggtcgggctcaggcagcaacggaaccggcgacggatcgggccactccggctccgacggagcaagctccaactccggttccaatggttccggttccgactccggctcctcgtcgagcgggtcgtcgtcgggatccggatcgggttcttcctccggtggcggctccaccggcaccggcaagtccggcaaccaggcgtgacaccaagcagtccactcgtatccggccgcttatcccgcgggagtcccaccagacagccacatatgggactttcgccggataagcggcccaccggccacgttccccacacccctatgtcgccccttatccgacgaaagtcccatttagccatcctcagatgggactttgggcgggtgagacggatgacgcgggtgacggaggctgtacgacacgcccagtttggttttcataccgacttgaggtaaattatcaatcggctcaaaaagcagccgataattgaatttggggctatggcgcagctggtagcgcatctccatggcatggagagggtcaggggttcgaatccccttagctccacagattgaaaccggtcgatttcgaccggttttttcgtttacgcacgctctccggcaggcaaccaaaagaaaacgctccgctttctcgctttcgaggggttgattccacactcaaggaacatctatctgcgtttcagggggttgccagattgcgatatccggagtattccggccggattgccattgaagtcatgcggttcctggagcttggatacttggccggcaaccccttgaaacgcagatagatgtttcagcgtcaccgaatcaacccctcgaaagcgagataggcatccattcaccgaggaatcggcggatgaccgtcagtcgccgtgctgcacgcgcatgagcaccgtgccgtccgagccgctgacgaccgcatgaggtgccgggtcgagcgacagctcgacatgcaaacgttctccgccatggccgaccgcatcataggcgtaccgcctgttgtcgaccgtcaccggcgtcgtcatggcgtgggtgagccacggattgcgcctgcggatgccgatcagcccttggatcaggcgatacatccactcccccgtgccaggcaaatcatccggcgatgcggggaacgccggccgcaccgcgtcatcgccgcccatgcggtcctccttgacgccgcgaaacgcctgctcgtcgccgtaatagatgctcggcacgccgccgacggtgaacaacacggtcatcgcaagggaggctccggcatctcctacacgactggcaatgcgtgtcacgtcatggttgccgacgaacgtctgcggcgcgaacgactccagaaactcattgtgccgtttgaggctccaatccagttcatagaagttcgcggattcgagcgaactccaaatcgccttccacagctcgtactgggtgagtgaatccatgccggattgccggacaatcgcggggtaatcgccatgaatcacctcgcccatgatccacacgtcggggaattcgcgccgcacggcgggcagaacacgcgtccagaacgccggcgacacggcgtaggcggcgtccagccgccatgcggaggctccacgccgcagccaatgcagcatcacatcggtgacgagccgcacgacctcttccgagtcatgattgagttccggcagttcggggtgcccctcgaaccggcgatagtccactcccccgcccgcatttcgcgtgatgtggaacatcgactcgtggccgtggccggcgagcgcgtccctaaacgccgggaacgagcgcccaacatggttgaacacgccgtcgagcatcacgcggatgccccggctacggcatgcatcgatcagcctgtcgaatgcggcgtcatcgccgagccgagaatcgatgcgatagtagtcgaccgtgtcgtacccgtgggtctcggacgcgaacaccggccccagcagtaggccgttcgcgcccatgtcgatgagatagtcaagccacgggatgatggcgtcgagtcgtggcgtcaacgcccgctcgccctcgttggacgggcgtatcggggcgccggtgaatcccagcggatacacctgccaccagatggtcgtgtcgttgacgctcatgccatagccgctcatcgcattctcctcatccggcacacccgttcccgtttcccgtgaccgggtgtgccgcagcgatcatctggccgggaaatccgggtatccgtccccgtcgaggtcggatccgtccgggccgccgtagtagccgtcgccggtgcccatgaactcgcgggtgctgacgcggttgacattgcgggcggcatccaccgcgtgctgcagttccttgcgcacggcgaaaccgtcgatgatgttcttcagcacgatcttgccgccggtggactggtccatcgcgtcgatgagaatcgtgctcaagccgaagatgcgctgcagcagcgtgcgcgagatcgtgatgtcgacgatgcggaacagcttgacggtgtcgaagctctgatgcagcagaccgctctgcgtggccagctcgtcggccgtcagagtgtacgtggtgaacgtgaacggggtgcggcaccagttgcgcttgcgctgcgtccagatgatgtcgccgtctgcgatgttcttggccatgatcggtctcctcctgctgtcgatgacggtatgctcccatcgtagcccgtcattcgggacgcaatgtgtcctctgccagcgtacagggaacggcggatagagggacggacggggagaacgcagcatcaggagcctgctatagggacggatgctcccactggtcggtgtcggcgagcgccggaccatgattgtagtcgacgagccgccatcgcaacgtgccgtcgggcatgtcggctgcgacgaaccgcacccagtgcgcgttgcccatgctgaccacgtcggcgaaatcggggtggatagcccccaatcccagcacggtctgcacggtctgcgcgatccatgagccatgcgagaacacgtacagatctgtgtcggctccggcgctgaacgaccattcctccaatgccgcgcggcctcgctcgccgacggcggccttcgtctcggcaccatgccgcagttcgccaccgcgatattccgcccatgcacggtagtcctcagggcattcgcgctccagttcggccagctccttgccttcccattcgccgaagttgcgctcccgcacgcgggcgtcggggtgcacgaccagtccgagcgggtcggcgaaggcgtgcgccgtggccatggcacgactcaggtcggatgccacgacgagctgccggcgttccgggtgcgattcgacgtatagggagcgcagtgcctgcgcggtctgcctgacctgccattcgccgatctcatccaaggggatgtcaatctgcccctggaagcaatgccgggcgttgtatgaggtgcgcccatgccgtatcagcgtgatggagcggacgtgctccggcatcgcctgcggcgaggagacatcactcatcagcttcgccgtcatcgtcaccgtcactgccgttgtcggcggattcgtcgcccgtcgtctcggggtgttcgagaggcagctcgacgacggggcagtcacgccacagccgttcgaggcgatagtactctcgcgcgtcctgatgcatgatgtggatgatgaaatcgccgtagtccagcagcacccactgtccttcgtcgacgccttcgcgcgagcgcggggacagatgcccgcacttgaggtacacgtccttctcgacctcttccgcgacgccgatcacctggcgctcgttcatggcggtggcgaccatcatgatgtcggtgatggcgagcaggtcgctgacatcgaacgcctcgatgtcggcggctttcatgcggtcggccgcgactgcggcgacgcgcacggcatcaatggaactctggactgctgtcattggatcaacgctcccaagcgggcttccagccctcgacgatgtgttgtgtgttttcggaatagaccatcgaatcgtccggcacggcgtggcggatgaccgaaccggcaccggtggtgacgccgtcgccgacctcgaccggcgcgacgaacaggttgccggcgccgacgtgcacgttcgagccgatgtgcgtgcggttcttgtgcacgccgtcatagttggcggtgatcgtgccaccgccgatgttggtgtgctcgccgagttcggcgtcgcccacataactcagatgcggcaccttggtgccgttgccgatgtgcgccttcttcatctcgacgaacgcgccggccttggtctcctcgcccagctcgttgcccggccgcatgtaggtccacgggccgatgttcgcggcacgcccgatatgcgagccctgcacgcgggagcgttcgacgacggcctcggcgtccacggtcgcgtcgatcaacgttgtgtatggacccacgaccgcgttctgaccgatcacggtgtggcctttgaggaacgatccgggcagcacggtcacgtcctgcgcgagttcgacgtcgtcttcgatccacgtggtgtcggggtcgaggatcgtcacgccgttgagcatccagtgctcgcatacgcgacggttgtgcgccttcgacagcgcggcgagctgcaggcggtcgttcacgccttcgacgctcagcgggtcgggcgcggcgaacgccccgaccgtgccgcgcgtcttcgcggtctccagcgcgtcggtgagatagaactcgccctgcgcgttgtggttgtcgaggttcgcgatggcttcggcaagcagatcggcgtcgaacacgtacacggacgtgttcacctcctgcaccgcgagttcgctccggttggcgtccttctgctcgacgatgcgcagcacgtggccgtcacgatcgcggatgatgcggccgtatccggtcgggttgtcgaggatcgtggtcagcacggtggcgccgtcgccgctctgctcgtggaacgccacgagcttcttcaacgtgacggagtcgagcagtggcatgtcggacgcggcgatcagcaccgagccatgcaggttgcgttcctgggtcagctgcgccatcgcgcactggaccgcgcggccggtgccggggatgtcgtcctggttgacgatgtcgacgttcgcgtcgtaggaccgtgccgcctcggagacgcggtcggcctgatagtgcacgacgacggccagcgtctcgggctccagatgtccgaccgatgccatgacgcgctggaggaaggtcttgcccgcgaattcgtgcaggaccttcggcttggacgaacgcatgcgtgttccctcacctgcggcgaggacgattgcggcggatagtgccatttcggtgcgactccagttctctgccgactgcaggattgctgcccggccgcggattgccgcgaaaccgggcgcgaaagttcccccacctggactcgaaccaagacaaagggttccaaagacccgtgtgctgccattacaccatgggggaatggcggtgaacccgccaagtttttattatgccatacctcgcgacttcgtcaaatcgaagctcatgcgaacaggaagccctgcccgtggtgctcggggtacgtgtcgaagagctccgcgacggaaccgtcctcgaacaccgcgcggatggcgctggcgagcagaggcgcgatcgacagcacggtcaggccgtcccagcgcttctcttcgggaatcggcaccgtgtcggtgagcacgatctcgctggcgccgcagttcttgagacggtccacggccggaccggacagcacgccgtgcgtggcgaccacggtcacggacttggcgcccgcgtcacgcagcacgtggcaggctccggcgatggtgccggcggtgtcgatcaggtcgtcgacgagcacgcagtccttgcccttgacatcgccgaccacacggttggcgaccgccttgttcgggcgcgtgatgtcacgagtcttgtgcacgaaggcgagcgggccgccgccgaggcgttgcgcccactgctcggccacgcggatgcggccggcatccggggagacgaccgcgacgttgcccagctcgttggagaaccgatcgcggatatagtccaccagcaccggcatagcgatcaggtggtcgaccgggccgtcgaagaagccctgggactgcgcggcgtgcaggtcgacgctcatgatgcggtcggcaccggcggtcttgagcaggtcgaagatcagacggcaggagatgggctcgcgtccgcgatgcttcttgtcctgacgggagtagcccagcagcgggcataccgcggtgatggaacgcgcggaggcacgcttcaacgcatcgatcatgatgagctgttccattatcgacttgttgaccagatccgcgtgggtctgcagcacgaacacgtccgcgccgcgcaccgattcggtgtagcgcacgtacatctcgccgttggcgaaatcgtatgcggtggtctccagtatatcgatgccaagctgttcggcgacgtccgaggcaagcttcggatgcgtacggccggtcacgaggatgaggtttttatcgggctttccttcgaggattgcactcaccatgtctccaaacgtttgtgtttcgctgaagtggacaatgtcatagtaaccgtgcacaccgaccgcatgtcacatgcaggccagccccggttcatgttccgttagcgttcccggcacgactcgccggcgtgtcccggtcagccggaacgcctgcggtacaggccgtgcttgccgatgtactgcacgacgccgtcagggacgaggtaccataccggctcgccgtgcgtcgcgcgccgacgcacatcggtggaggatatggccagcgccgggatctccagcgtgtccaccttgccgtcgggcagccgcaccccctgtggcgacgagtagccgggccgtgtgaccgctacgaaatgcgccagatcccacatctggtcggcgtccttccactccatgatctccgccaccgcgtcggcgccggtgatgaagaacagctcggcgtcgggatgctgcgagcgcaggtcgcgaagcgtatcgatggtgtaggtgacgcccggccggtcgatgtcgacgcgggacacggtgaatttcgggttcgacgcggtggcgatcaccgtcatcagataacggtcctcggcgttggtgacctgcttgtcgagcttgaagaccggccggccggtcggcacgaaaatcacctcgtcgaggtcatacacccaggccacctccgaggcggcgaccaggtggccgttgtggatcgggtcgaaggttccgcccatgatgccgacgcgcgggcgcatgtgccagttgccgcgcgtggagaaccgcttggctccgtccggtttttcggatgacaggtccgacatgcggcgctccggctcaacgagatattggatttcgggcgaggggtcggcttctgcggccaatgggcttgcctcctgcggcggccttcgcgtcgtcatgcctccgagacctccggctggctgtccgcctcgtccgtctcgcgcttgccctggtccgcggtggtgttggcctcctgcgggtcgatcttgcccatgtcctcgtcccattcgtcctgcacgacgcggcggatctcggcgaacgtgggcagggggaagccgggctggtacagcctgcgcacttcggcgacgcgctcggtgatacggatcagcgtgtcggtcatgccgtcgacgtcgcccttgcgttccatggcgctgaagcggcggatgtactgctccatcatgctcatctgttcgcgcaccgtcttcagcttcgccgcgtccagttccacgacttccggggagtcggtctccggccagccgatgagcacggcgtcggcatattccagcgatgcccgctggctggccgaggcgatgccatcctcgatctgcaccaggaacacgtagcggacgatgctgagccgttccgcggcaatcttcaggcccaatgtctggtcgttgagatcgatatcgtcccgtatggtggaaatcaccggtcgttcctcgctcatgctcgcacctgccccgttccgtagccgatccacttcgtggtggtcatctctttgagtcccatcgggccgcgggcgtgcatcttctgcgtggagatgccgagctccgcgccgaagccgaacacccctccgtcggtgaaacgggtggaggcgttgaccatgacgacggccgagtcgatgcgcttggcgaacgtttctatcgcggagtagtcctcggagatgatcgactcggtgtggccggtggaatgcatgttgatgctgtcgatggcctcgtcgagcgaatcgacgaccttgacccccatggtgagcgccagatattcggtgtcccaatcctggtccgtggcgtgcttcatggcgaggcttgggatgccggccgcctcgatgatggtgaacgcccgctcgtcggcgtgcagctcgacacccttgtcggcgagcgccttcgccgcggccggcaggaaccgttcggccacgtcgcggtggaccagcagcttttcggcggcgttgcatacgccgacgcgctgcgtcttcgcgttgatgatgatggggatcgccttgtcgaggtcgccgctgcggtcgacatagatatggacgttgccggctccggtctcgatgaccggcactttggaattgcgtacgacggcctggatgagtccggctccgccgcgcgggatcagcacgtcgatgtggccgcgtgcctccatcatcgccgtggcgccctcgcgtccgtattcgtcgacggtgtcgatcagcgacgggtcgaatccgttcgcggcgagcgcgtcgtggatcaccgccagtgtcgccgcgttcgtgcgctctgcgtcgtgccctccgcgcagtatggcggcgttgccggatttgaggcacaggctggccacatccacggtcacgttcggccgggcttcgtagatcatgccgataacgccgatgggcacgtgcacctgattgagccgcagcccgttctccagcgtgtatccgcgctcgatctcgccgaccggatcgggcagcgaggccacgtggcgaacaccttcggcgctgacggcgatgcgcggctcgtcgaaccggagacggtcgagcttcccggcgtccatgccgcgagcggctgcggcctgcatgtcctgcccgttggcggcggcgatggtcgaggcgtcggcgtccagcgcatcggcgatcgcgtgcagcagggcgtttttcacctgggtgtcggcctgcgccagatcagattgggcgcgtgcggcggcgtcggctttcgcgcagacgccggagaacacctcgccgttcaattcatctttcgtcataaagcccagaataacgcagattgcgagctttgcggggcattcgtgtcatcatgtcaatatgggggcacgtgtcctgcggccgcgacgcacgccggggtccatgccagtatgcggtacccgccgccgccatgcccacgcctgacggtagacttgagccgaacttcatcccattcagcagcaacgcaaggattaccagtgaccacgttccacagcacgcgcagcaccaccgactcacttacctccaagcaggccatccgcaagggcatcgccgacgacggcggcctgttcgtgaccgattccctgggcgagacgaaggtggacatcgcttccctgacgggcaagccgtatcagcagatcgccgccgaggtgctcggtgcgctgctgccggacttcaccgaggccgagctcgcgcagtgcatcgccgacgcttacggcgagcagtggtccgacaggcgcatcacgcccctgaagccgctcggcgacgactacatcctcgaactgttcaacggcccgacctccgcgttcaaggacgttgcgctgcagatcctcccccgtttcatggcgcacacgacgccgacggacggcgacaccgacgagaagatcatgatcctgaccgccacctccggcgacaccggcaaggccgcgctggccggattcgcagacgcgcccggcaccgcgatcaccgtcttctacccgcagggcaaggtgagccaggttcaggagctgcagatgagcacgcaggccggcgcgaacgtgaacgtgtgcgcggtcgagggcaacttcgacgacgcgcagtccgccgtcaagcgcatcttcggcgacaaggagctcgccgcgaagctcgccgccgactcgcacgtcgtgctctcctccgcgaactccatcaacgtgggccgtctcgtaccgcaggtcgtctactacttctccgcttacgcgcagctgctggagaaccaagtcatcaacgtgggcgacgaggtcgagttcgtcgttccgaccggcaacttcggcgacatcctcgccggctactacgcgaagatgctcggtctgccggtcaagcacctcgtggtcgcctccgacaagaacaatgtgctgttcgacttcctgaccaccggcacgtacaaccgtcagcgtccgttcttccagacgatcagcccgtcgatggacatcctcatctcctcgaacctggagcgcatgctgtactacatgtccgagggcgacacccgtctgatctccatgctgatgaatgacctcagccagtggggcacgtacgaggttccggagccgctgctcgcgaagatccgtcagctgttcggctgcggctgggccgacgagaaccaggtgcgtgagatgatcgccgactgctggaagaagaaccgctacgtgatcgacccgcacacggcgtgcgcgtacttcgtggctcagcaaatgccgcgcgacccgttgaccccgcgcgtgatcctgtcgactgcgagcccatataagttcccgcgcgtggtcaacgaggcactgggcctggatgccgacggcaccgatttcgaatgcatggatgtgctgtctcgcgagaccggcaccaccgctccggccgccctgcgtggacttgagaccgccgatgtacgtttcaaggacgtcgtgcccatcgacggcatggaggattacgtcgaaaaggccgcccaggcgctgtaacagctcagcccgccagcaggggcataaaggggcttacagctctttggcgcggtagaagcggatggccagagcggcggagatgcagtagacgcccacgcacagcacgacggcaatcagagcggcacgccaccatacgctcatgaaatccgcgacgccttgcagcaagccctgccaatcaaacggcaatctggacagcaacgcgacgagtgcatacagcccgactatgaccacaacgaatatccgcatcatcgcccggaacgtgaaccggtacgaaaacgccatcagaatcgatccgacgatcagggagaacgcgaagatgacggcgctcggtatcatggcaccggcccagccggaatccatcatgtcgccgaaggcgaagaagacgctgcatgccatcacgtccacggtccacatcgcgcaggtcaccagcagaaacaggaaccgtccggccacctgcgacgtacgggcgatgggaatcatcccgttcatggcccgatgaccgccgctctcctccgcaacattcacgctcaaggcggacatccacgacatcaccgcagccatgccgcttacgccgccggagacgctgacggcgacctgtccgggtgcgccggtcacggtcagcaccagcgcggccacgcaggacagcacgggaaacagcaacatgaacagcatgttggacaacccgaacaaatccactcgcacgcaatcgaacctgcactgcctcactacggaactccagcgcatctcaccactcctttgccttgtacacgcgcacggcgatcgcatacgagaccgcatacgccgcggcggagaccgcgaccagcatcgcggacagccagaaacgatgcgagacgacggcgtccaccacgcccatcaccttggcgatcatcgatacggggaggactgacgggatgaacgccccaatcaacgtgacgacatagaacacccacaccgtgatctgcagtccgatgatcttgtcccacaaacaggaaacaggcatgatcaccgcaataatcagcacgatggccagaccgcccacgccggccacccacagattgcccgtgaatgaccaatcacggcggacaagcggctgcaccccatcgatcaatgcaatcaccacggccccgtacacggccagagccagtcccatcaagtaccgcgaggccatctggttccgccgcgatgcgggcgccaacccgcgcagccggtacccgctctgcatgtcgatgagcggcacggtcagcaccatcatggcgggcgagaacaccgccatgacgacgcccaaccggaaaccgaagccgtcgacgaacgccccgccgttgaacatgatcgaaaacaccggtgcgagcagcaccgaggcgaatgattgcatggcgccgtcgcccagcagatacgccaggtccagatgcaatgcggtcgccagcccacgatttccccgccgtgcccgtacggcacgggatggcacggtctcagtcaacgttcccatggccgacctccttgagtgcagacgcggcctcgggcgaagacgcgacggaatcacgggcgttggtcaggcggatgatatcgtcgatggaggccggctcgacgacgatatcggcgacggctgcgctgacggtgccgaggctgtcggagcgcaccagtgcatcgaaaccggtctggtatgtgtgcgagccaagcaccacgccggcaggcagctgggccaactcgcccggcccgcccttgactatacggaacgattcctcgaattcgtccttcggcccggtgtagtagagccttccaccagtgatgtaggcgatgaagtcggccgcacgttcgaggtcgacggtgatatgggtgctgaacagcaccgaatgctcgccgtcctcgatgtaggcgtgcagcatgtccatgagttcgtcgcgggcgagcacgtcgagtccgctggtcggctcgtcgaggatgagcagtttggcgtcatggctcaacgcgatggcgagcatcagcttcatctgcatgcccctcgaaaggtccttgatcttcttcttgccgttctgggctcccccgagaccgaaatcgtccaggtaccgccgataccgatccccgttccatgccgggtagagcggggcgacgatgcgctcgaccttcgagaccttccactgttcgtacaggtagctggagtcgaacacgacgcccagctgttccttgacggcctcctcgtcaatgatgttgtcgaggccgagcacctggatgctgccgtggtcccgtcggatcatgttgaggatcagcttgatcagcgtggattttccggcgccgttcgggccgatcagccccatgatgtagcccttgggcaggtcgaaggtcacgtcgtccagcacgaagccggagtcgtagtgcttggtgacgccggtgaccgcaagggccatcgtgtcgggttcggatatggtggtcatggctatggtccttttttgggaaactctctcgtcccgtggcctcgcgtatcacagcgacgccacggtgttcgcaggttgccggccaatgccggcactcactgcttgcggtactcgtcttcgagcatgcggcccagttcactcagcgcgatgtcggcggctttggccgcgcgtatcgcctcggccaggttttcgcggacctgggtttcgagctgacgtcgcatcagctcgttgcccttgtccatcacgaaggtgcctttgccctggaggttctgcaccacgccctcatcggccagtttgttgtacgccctggtgacggtgagcacggagacgcgcagttccttggcgagtttgcgcagcgaaggcaaggcctcccctgcctcaagctcgccgctcatcacggcgctgcgaatctggttcttgatttgctcgtagatgggttctccggacacggatgagatgatcagtttcatctatgcccctttccatgtgtctccagtatcacagccggattactgttctactgttacgtataacagtagaacacttatggacaactgtcaaggtcgagagcataacagttgcgcgtcggttcacagactgcgcggcgcctcgctgaaatcaaacagcacgccgtcggcgagaccgcagatatccggccagtccccgtcagaagaatcatcatggatcgcccatacccgcatgccgacggacttggcggaccgcatcgccaccagcagatcctcgaacaccgtgcactgctccggcaccacgcccagacggccggcggccagaaggaacacgtcgggacggtccttgccgacattgttcgcatcgtcgacgctgacaatctggtcgaaatagtcgaaaatgccgacgtgcttcatcgccggctcgcgcaacgccggcggcagggacgtggcgacggccagcttcgcgcccgaccgcttgagatacgacaggtattcgaccgcatgcggcttggcctccaccaccgtcgaataggcgacgcgcgccatgtcatcccactcctgcatcagcgcctcgggcgtgtcaggcaggccgaaccgggcgatcgtgtattcggcgatctgccggaactgcatcgccgccactttgcccatgtagtcggcagggacctcgatgcctcgtttggcgaggaaatcgatgtcgacctgatcccatacgcccatggaatccagcaacgttccgtcaagatcgaagattgccgccttgccgtggttgtcgtccatgatgttccttccgctattgccggttatccggtccgtatgtgcgcgctggccgtcccggctatgtcagcgacgatgatgccaacagctcgcgcgcgtggtcgagcgacgcctcggattcgctgccggacagcatccgggcgatctcatgggcgcgcgcgtcgccgcatacctcggcgaccgtggtcgtcaccgcggactgcccgccgtccgaggcgcccttggtcacgacgaactgcgcgtccgcccatgaggccacctgagccaggtgcgtgacaacgatgacctgcgaggtccgcgcgagacgggcgagacgccgccccagctccactgcggccttgccgccgacaccggcgtcgacctcgtcgaagatgaacgtcatcggcccgccctcgcccgcgggagccgcactcgaacgccgatccgcggcggcgagctccaatgcgagcatcaggcggctcagctcaccgccggaagcgcttttgcccatcggcagctgcggggatccagggaacggcgtgaacaggaattcgatgtcatcgcggccgttcgcgttcagcggccatgtcgaggcctcgccggcggaatcggatacgggtatcgcctcttccccgcgatctgtgacgcggatatcgagccgcgccccggccatggccagcgacgacagctcgtcggtgacggtggcggccagcgactgcgccgcggcccgtcgcgcctcgctcagcgccccggcatcctgcagggcccggtcgaatgcggcttcgcgctcgtcctgcagctgggcgaccttctcaggagacgcgtccagatcctcgacctcgaacgtcgccttgtcgcgccatgcaatcacgtcctgcagcgtcggcccccagcgccgggtcagctcgcccagctcgtggatgcgcgcgttgatggcatccagatcctcgacgctctcctcgccgtcaagctcacgcgacagcgagaacacgatatccgacagatccgcgttcagggattccagacggtcagccaattcgccgaaatcaccgtcgacatggatgtcgcgcaatgaggagatcgcctgattcagcagatcagacgcgctcgatgaatcggcgtcgacatccacctgggaggcgtcaagcgccgcaagcgcccggctgacaccctgcgcgatatcggcggcgttctcgatgcgggcgcgacggcctttgagctcctcgtcctcgccgggctgggggtcggcgcggttgatgcgctggatggattcgcgcagatagtccgcacgctgtctggcggacgactcctgatggcgcagccgttccagacggtcatcaagatcgcgcagagcatcccatgaatgacggtaccgcgccagcagatcatcatcgccggcgaccatgtcaaggaactcccgctgcctggatgcggcggcgatgcgcaactggtcggcctgcccgtgaatcgtcaccaactgcgacgccagtgattccaagaccgagcggggggcgctcttgccgttcagcacggcacgggaccggcccgacaccggcaccgtgcgcgacaagtacaactccccgtcctccagcacggcaccggcatcgcgggcctcctgcgccacgccgccgcggtcatccacggcgaacacgccttgcgcccatgcctccgaagcgcccggggacacgcgcccgctgctggccggtccgccggaaatcagccggatggcgctcaacagcatggacttgcccgctccggtctcgccggtgatcgcggtcattcccccggccggcgtgagcagggcacgatgaatcgggccgaggtcatgaatttccagctcctcaagcatggtcgaccccctgctcgccggaagaaggcaccgcggccgtgtccgccgcaccccttgcacgcgtgcgctgcgccgaggaaccaccgttcctcgcgtgctcgcgccatccgaccaccggcagatcgaatttggtgaccagacggttcgtgaacggcacaccggacagccgggccagccgcaacgtgctcttcgactcgcgcacctcgacgcgggtccccttcggcagggcgcactgccgtcgtccgtcgcaacagatccagccttcggatgacgaatcgtcgaggatgtccagagtgaacgtcgagccggcgccgatgatcagcgggcgggcgaacagagcatgcgccgccagcggcaccaactgcagcgccttgacgttcggccacatgatcggccctcccgcggagaacgcgtatgcggtggatccggtcggcgtcgacacgatgacgccgtcacagccgaacgaactcatctccacatcgtccacccggaccgacagctcgaccatcttgccacggtcggcgcgctccaaggtgatgtcgttcagcgcccagtcctgcagcggctcatgcgcacccggcagccacacatctacatgggcgatcatgcgctcgtcaatcgaatagtcatggtcggcgacgcgccggatcgcctcgctcatctggaaactctcgaattcggccagaaaaccgacatgacccatgttcacgccgagaatcggcacctgcgtgcaatgcaccagttcagcggcccgcagtatcgtgccgtcgccgccaagcaccacgacgatctcggtgtcctcgtcgaccttgtgggtcacgccgccgaactgcggcgcctcgacgttgtcgatgatcgacacctcgaacccgacgttgcgcagccggtcgaccgcctcagacaccaccgtgccgctttcacgcagacgcgaatgcgtcaccaccactgcatgccgagcgcagaccatcgcacacctcatcatcatccgaaacgaccacgtactgtcatccacaatatcccataaggcgccacgaaccgtttatccgccgaaaacgaaacgcaagcgccgccggcggcgcgtccatgaagaccgatccggggccgggcgggcccgcgcccgcgatgcggacgacggcggcatcagcgccaaagaatactaaaatggcgagtgcaaccagtctgttgccgcgcttgacgcgcgccgacgcatacgaaggagcggggaccatgtcaaatctcgtttttgacgagtcctcagcgaaccgcgaggcatcgcacggctacgcgtggtggttctccggcgacacgttcgagaaggccgccgccgaggagcgcacccgcaggaaacgcagcttcattcaccatctcacctcgcatcccggccgtctgaccatcatctacttcctgctgctggtggctctgtccaccagtctgttgctactgccggtctcctcacacgaagaggagccgaccagcttctccaccgcgttcttcaccgccgtgtccgcactgtcgacatgcggcatctccatcgtgaacgcgaccacgcactggaccgcgttcggccaagtggcgctgctggtgtcggtgcagatgggcggcttgggcgtcatgacgttcgcatcgctgatcgccctggccgccaaccatcacatgaaagccacgcagaggctgctcaccgccaacgagctcggcaccacgaaactcaacgagatccgcggcgtgctcaccgtggtcatcaccaccacgttcatcatcgagtccgtcacgttcctcgccctgttccccggcctgtacggcatcaacaggggcaatgtccgccataccgcccgggaggcgctgttcttcgcggtcatgtcatacaacaacgccggcttcacgccggacggcgccggcctgcacgtcaacaactgggcggtcggcatgccgatcatggccagcgcgttctgcggcacgctgggatttcccgtgctgctcaacctcatgcgctgcgcccgccaccgcactcccccacgccgttggagcctgcacaccaagatcaccttggtgacgacgttctcactggtgctgctgtcgctggcgtggttcctgctggtggaatgggacaacccattcctgttcaagggcgccgacgtggagacgcggctgcgttacggggtcgtcgcggcggtaatgccgcgcagctccggcttcgacctgagctgggtgccgcaggtgagcgagccgacgaaggtgttcatgagcgtcatcatgttcatcggcggcggcagcacctccacggccggcggcatccgcgtcacgacgttcgcggtcatcctactgatctgccgtgccgcgttcaccggacacaccgacatcaacgccttccggcgccggattccgacgcgcgtggcgatgaccgcggtgagcatcaccgccgcctgcctgttcctagtgctgagcgcttcgctggcgttgatgctcgcctcggactgctcgctcaccgatgccctgttcgacgcctgttcgtcgttcgggctcggcggctattcggtcggcgtggcgcgcgaggacaatccggcggcgttgttcatcctcgccacggcgatggtggtgggtcgtctcggtccgatgacgatcgcatacgcgatcaacaggccccgcgccttggaatcgatacgataccccaacgagcccatcgtggtcggctgagggcgccgccgataccgtctgcatccgacggatgccgccgactccgcctttgtcggacggccagggatggccatatcatgacgtagaagcggtaccgttcaccgccgcccggagaatcggcggcgtccatgacggcggcaccggcgcatcgccgcgcacggcggcggaaaggatgatggcatggcacgcaacaacaggagcattctggtcgtcggactgggacgattcggcagttcggtggcgaccacgttggattccatggggcaggacgtgctcgccgtcgacaaggatcccgaactggtcaacaggtggtccgcgcaggttcccaccgttcaggccgacatgaccgacgtgctcgccgtcgagcagctcaacgcgtccgatttcgacaccgccgtcgtcgccatcggagacagcgtcgaggcgtcggtgatcaccgccggaaacctgctggacgccggcatcagcgacatctgggcgaaatcggtgtcgaaggagcacgcgcgcatcctgcagcgcatcggagcgcgtcacatcatcaacgccgaaacggatgcaggcaagcgcgtcgggcatctggtgtccggaaactatctggattacatcgagatcgagggctcgcacaccgtcgtcaagatccacacgccttcgcacgtggtcggctattccatcgcggacgcgaaggtcaacgaacgctacggcgtcaccgtcgtcggcatcaaggcgcccggcagcgagttccagtacggttccaaggaactggtcatgcaccgcaacgacgaactcgtcatcatgggcaagcaggacaacatcgacaagttcattcgcggctgaccgacgccaggcaccccccatacccccgtatgaccacatactgaacgcaggcacgtgccgcagcgccatccaattggtacagtcaaaaaggtgttgcggcacagtcgtcgcaacgtatcgacatggcggcggcgagggtggcgcaatgggcaatatcacgatggttgacgggcatgtgcccgacggctcgtatcagaacgtgacggcgaacggcagctgctcctgcgatgccggcatgcgattcgacggtttgcgtgcccgcggttcgttcgatgcgatggggctcgacggcgggaacgtgcattgcgaggggcgtctggtctgccgcggcgacatgcatgtcaacagaatcagcgggcatggcgaactgcatgtcggaggcgacctgcgttgctccgctctggatttcaccggcaagatcatcgtgcagggcgatgtcatgtgccctggcggcatgaccgttcgcggactgctgcgcaaccgttcatgcatcgtcacgagatacctggatatgcagggcacgttggacgcggacgagctgcgcaccgaacggctgcggatgactcccctgtcaagcgccatgttcgggcgcagcggcatgacggaattcacccggacgagcaacgccgaacgaatcatcggcggcgatttgcgtgtcagcaggctcatctgcaccctgatgcagggcgtcttcatacggttgactgacgaatcgcatgtggaacgcgcctcgtgcatcacgaagctcgccatggacagcacgtccagcgtattgctggtatccggcgccgccaagcgtgtgtatctgcgcaatacgtgacacggacgacgaatccgcgcgcgatgcggcgtttttcagtcggcctttgcggcgatgtcatccatgcgggcgaacagcaggaactccgtgttcccgtgagtgccctcgatcggtgacggggcggttcccgcaaccgtcaacccatgctggttcgcgcaatcgacgaccgtctccagcgcctgatcgcgcagatgccggtcctccacgataccgcccttgccgagattgcccttgcccacttcgaactgcggtttgacgagcagcaccactgaggctccgggcgcggcgatgcgcgcaatgaccgggatgacgtatgtcaaggagatgaaggacacgtccgacacgatcatgtccggccgatacggcagattcgcggcggtcacgtcgcggatgttgaccccgctcatctcgatgatgcgcgggtcgcgcgcgatacgactatcgagctgaccatgccccacatccagggcgatgacctgagcggctcccctgcgcagcagcacgtcgcagaagccgccggtcgaggcgccgatgtccaggcagcgcaggccgcgcggcgaaggcaggcctcgaccggagaactcgtcgaaggcgccgatcagcttgtacgcgccgcgagacacgtagtcgtcgcccttgtcgacggtgatcgaggacgcggtggccacgttcgcggccggtttggtgacggcgaccccgtcgaccagcacatggccgtcacggatcagccgctgtgccttggagcggctcggcaccaatcccagaccgacgatgagcgcgtcaagacgttccattcctgcacctttcacatccggtggtttccctgccagcggtcttgtctttcagtggttctcgtcgagctcgcgctgcagttggccgagcacgtcgcggaagacctcgatgcgctggtcgtcgtctttgccgtcaaggtcggcgagctgtgggtaacgttcggtgatatcgtccggcatgaccgctccttatgcccagtgtttcatgtgcccctgcacgtcacggaaaacgccgccggccttgcggcgggcggcgatgatcacagtgagaattccggcaatgagaccgaaccgatgtccccgccgttgtcggcgtacgtccatgcagcggcgcaggccgcgcgcagggcgttgatgtcggtcgcgtcgctcaccgtcagtgagccgtcttccagccgggcggtcgcgtcggcgcacgtccagacgttgtcgtcgctcgcatcggtggatggctgggcctcctgcagtccgcgcaggtcgcggacgatataggacgggcgcagatgcgccggcgccgtcatcagctcatgcgggttggtgacgccggtcagcaccgcgagggaatcgtatccgccgcggttgccggcctcgatgtccgtatcgagacggtcgcctatcgccaggcacgattcacgactgaccggctccgtctcgtttcccgcggccagcagtcgggcctcgtcgtacatggcagactcgggcttgcccgcggatgcgatcggctcgacgccggtcgcgttgatgaccgcctggatcatggaaccgcatcccggcgcgatgccgagctcgcggggaatggtcaagtcgcggttggtgacgagatacagcgcaccccgctccaccgcgtacgagacctccgccatctgctgccacgtcatgtccggataccatccctggatgaccgcctccggggtgtcctcggcatggtctaccacggtgagtccctgaccggccacttcctcgcgcagatgctcggcacccagcacgaggatgcgcgctccggccggaacgtgccgggccaccatgcgggcggccaccacggacgaggtgatgacctgccgcggttcgacgtcaaggccgaagcctcgaagctgctcggcgacgacgcgctggaaacgggaggagttgttggtggtgtattccacctgcattcccgcacgctgcgccgccctgatggaatcggcggcgtgttccaccgggttcttgccccggtagacgacgccgtccagatcgagcagcgccagccggtacgtctgagatatgggacggtcggtggatttgagcatggcgttcatgcgcgtcactcgtcctgcgcttccgcagccggttcggcggcgcccgagccagcggcatccaaagcttccgcttcggccgtctgcgcatcgtcggcttcggcgggttccgcgtcctcggcttcatcagcggcttcgccggtgtcatcggcgttctggtcggcggggtcggtgaaggattcggcgccttcttcggtctccttggccggcagctcctcctcgtcggccagcgggccgtcaagggacgcctcgtcttcggcatcggggttctggccggcttcggcatcggagtcatccgattcggcatcgtccgactcgtcgccgtatccgtcttcggagccgccgtacatgtcgtcgtagtcgtcgggcgcgaactgggcgtcgtcctcgctgatgccgagcatgtcgagctcgtcatcggtgaagtgctccatgtcgtgatcgataatcacgtcgtccacggtctcgtcctcatcggcttcggcgtactgggtttcgagacggtcgagcaggtcgtccaatgcggcggcctcctcggtacggccgcactcgtcgaggaagtactgctcggcctgcacggcacgcatgcggtattcgcccggcagccctttggaacgtccgagcgtgtggacgatctcgatggccttgtcccacatcttgaggtcggcgagggcaccggcatagaccaggaacatctcggccttcgcctcgccatgcaacgccttggcatcgtcggagcgcaccacttcgatggccttcttgggatcgccgttgccgcgttcgcagtcggcgatgaacggcaggtagtcgaggaagccgttcatgcggtacgcggtgcggaactcacgcagggcgagcttgtaatcgccctgacggtatgcgatgaaggcaagcgtctcacgggagaaatcgatgcgcgacgcctgatgagcagcccacttggcgtgggcgagggccagttcgggatccttctcctccagcgcataggcggcgaggatgtgcaggccgatgttctcggcgtgctccttggacaggccgcgcaggcgttcacgctcttccttggacagcatggaccattccatgcccttgggcatcttcggctcgttcggacgacgatccgtataggggttctgcgaagggtagcttaccgtgccgtcggaattgcgacggggaccgttcatatagtcctgacgcttctgctcccgatattcgcgcttctcctcggcggagaactcgcgacgctcgccgtcgcggcggtcatcgcgctgatagcgcgggcgatcgccatcacgatggaagtcacggcggtcatcgcgacggtaacgcgggttgtcgccgccgcggcgatcatcgcgacggaaaccaccacgatcaccatccttgcggaaaccacccttgtggaagtcacggcgctccccatccttgtggaaaccgccatcccggcggaacccgccctgatcaccgtcacgacgcggaccgcgatggaaatcacgacgatcaccatcgcgacggtcgtcacgacggaaaccgccgcgctcaccatcacgacggaacggacggtcaccatcacgacggtcatcgcgacggaaaccaccacgatcaccatccttgcggaaaccacccttgtggaagtcacggcgctccccatccttgtggaaaccgcccttgccgcggtatccgccatgctcgccgtcgcgccggaatccgccgcggtcgccgtccttgcggtaaccgcccgacttgcggtaaccgccggaacgtccggagccgtaaccgcggttgccgtatgatttgccgccggagcgaccctgttcttctgccatacgtgtatgcctttcttaatacaaagtctgttgttgcgatgcgatgccacgatgagcgggatggtctccatgccggcgcaaccaccccagccggccctggccggcagctccccgccagggggagcaggaatgaatcagtgcttctcgacgacgccgagcgccttcttgccgcggcggatgagcgcgaaacgaccgtgcaggaaatcgtcctggcccaacgtctgctcttcgtcggtcacacggttgttgttcagatacacgccaccggacttgatagtcttgcgggcctcggaaatagacttgaacaggcctgccttcaccccggcctcggtgatgcggtcgtcgatgccgacggacgcgaacgtcttggcaccggactcgtcctctatcttgagtccgtcgatggcggcttcaagcgtgtcctcgtcgatggaggcaaggtcgccgccgcgcccgaacagggctgcggacgcgtcgatcgccgcctgcgtcgcggcctcgccatgcacgaaactggtcacttcccatgcgagggtgcgctgggcttcgcgtgcgccgggattggtgcgcgattcttcggcgagtcgttcgatctcggcctttggcaggaacgtgaacgccttgagcaggccttccatctcgacgtcggggcggttgaaccagaactggtagaaccggtacgggctgagcatggtggcatcgagccacaccgcgttgccttcggatttgccgaatttcttgccggtggcgtcggtgatgatcgggctggtgaacacgttcaccgtgacgccgcgcaccttgcgaatcaggtccatgccggaggtcaggttgccccactggtcggatccgccgatttccagcgtgcagccgtactcgtcgaacaggtgaaggaagtcgttgccctgcagcacctggtagctgaattccgtgaaggagatgccctcctcggagttcagacgacgcgcgaccgtgtccttggccagcatggtgccgagtcggaagttcttgccgacgtcgcgcaggaagtcgatgacggacatctgcgcggtccagtcgtaattggagacgaaacgcaccggattgtcgccgtaggtttccagaatgccgccgatctgccgcttgagccgttcggcccagccggcgacgacgtccttcgggttgagggtacgctcgcccgactggcgggggtcgccaatcagaccggtcgcgccgccgaccaaggcgatcggatgatgcccggcggcctgaaggtgacgcatgttgatcagctgcacgagattgccgatatgcagcgacgccgcggtcggatcgaagccgcaataataggtgaccggctccccgttcaacgcttcggcgagttgtttcctgtcggtggactgggaaatcaacccgcgccattccagttcttcaaggacggaatcgaatccggcctctttgaaatcggtgacgtgagccatggatattggtactccctatcaaattctgggcattgtgcatctatcagtctcgcagaacatatcgacagcatgcgccaggacggctgcccgcgaaacgtcggggaatgctccccggttcgtcgcttgaatccggccgtcagtgacggtacaggctttcgagaatccggcgcagctgctccagcacatcgttgttgcgttcggtgcgcagtttcgggaacgaggcgatcattcgacgctgctgacggttgaagatggacatcgccgtgtccctgacccgcatcatgaagtcgaacgacatctccttgccggatttccacgattcgctcatcttgccggtgacatcgctgacggcgaccttcatggcgtctccgtaatgcgtcatggcggccatgagattgtcgagactgttctcgaaatgcatgatgccgcacaccgtgacgacgaggtcgatcagcgtgagcacgaacagcaccccgcacagccagtggatggcgggcagcggcagccggtcggtgacacctgcaacctgcggctggatcaccgacgtgatgagcacgccgcccacgccgaacacgaacgcccccagcaggcagatgcgcccgttaagattgaatttgtagtcggagtagtcccaccagcgggcatgaaacagcgcctccatgacccaggatgtgacgtattccagtatgctggccccgaccatcgaaagcaggaacaccaccaggggattgtgtacctgtcccagcaccacgacggcgccgaccgcgcccgcaccgtaaatcgggcacaacgggccgttgaggaatccgcggttgactggccggcgctccaggatggacacgagaatggactcgtacacccatccgcagaagctgtagaacaggaaccacaggaacagtttttccacgaacagcatcaggccggcaccccccggctccgtgagggcttgtgccgcccgtcgtgcgcggacgctgcggatgctccgctttcgattgcggcgaggggtttaccggactccagttgcggcttggagaaccgctccagggagaaggtctcccgcgtggcactgatcttgtcggccatggtgaccagatagccttcgatgtagctcggcggcttgagcgtcatggggaacatgtggcatgcgatgctgtcacgttcgatcgcgttgaggcggaagtcacgcactgcgttgcgcaatgcagcctgcccgtgcgtgaacccgtgcagcctatgggcgccgtcatcccagtcatgccagtcatacaggaagtaatcgtgcagcagagccgcgcggaccagcgaatgcagatcgaccttgtcccacagatgcaggcggtcggccatccacacggcgaggcacgccacgcggatagaatgcgcgaatgtcgtcaccgctccatgctggtagcatccgcgctcgatatgctgcatatgatcatggacgatgatgtcgtgcccatgctcgttgaccaacgaccgaatctgattgcgcgtcagcacactgtttcccttcgcccgaatccgtcttccgtatgcctgtgtctcttccagtcatgattctaggtcagactcctgtcacgcgggttcatccttcaggatgagcccgcgcgcgctggcggggatgtggaggcggtcagtcggtgacggaacgcagggacttcggggacttgtaggccggaccatcgctcacggagttggcgaacacgcgcagcgcgtcgacggtggccttggcgcaggcgatctgctcacgtacacgggccggcgacgtgccgcccttgccgttgcgggcggacacagagccttcggtggacagcacctcgcgcacctgcggggccttgtcggcgggcaggaagtcacggaagatcccgatgaaatcgtcatccgtgagatcccacagctcctggccgcggccttcggcgagcttgacgcatgcaccggaaagctcatgcgcgtgacggaacggcacaccattcttgacgagccattcggcgatgtccgtggcgagcgcgaatccggtcggtgcttcggccgcaagacggtcgtggtcgaagctcatggtggcgatcataccggtgaaggcgggcagcagcacctccagcgtatcgacctggtcgaagaccgcctccttgtcttcctgcaggtcgcgggcgtacgcggtgggcaggcccttgagcgtggcgagcaggcctgtcaggtcgccgatgagacggccggacttgccgcgggcgagctcggcgatgtcggggttcttcttctgcggcatgatcgaggagccggtggagtaggcgtcatcgagacgcacgaacgcgaattcctgggtgttccagatgatgatctcctcgctcagacgcgagatgtcgacgccggccatggcggcgacgaacgcgaattcggccaccagatcgcgcgaggcggtgccgtcgatggagttctcggtgaccttgccgaaaccgagttctcgggcgaccgcgaccggctccagtccgagcgtgttgccggcgagcgccccggagccgtacgggctggcgtcgatgcgcttgtcccaatccacgagtcgctgcacgtcacgcagcagcggccacacgtgtgccatgagctgatgcgcgagcagcacgggctgggcgtgctgcatgtgggtgcggcccggcatgacggtgccgccggccttgactgactggtcgatcagcgcggatgcgagagaaagcagctgacctgcgatgacgcgggagtggcggcgcagccacatgcggatcaggcaggcgatctgatcgttgcgggaacggccggcgcgcagtttgccgccgagctcgtcgcctgcgatctccagcaggccgcgctccagcgcggtggcctcgtcctcgtcgtcttcgatgggcgcaaacgcaccggagtcgacgcggcgctgcagctcgtcaagcgaggcttccatgtggctgagctcatcggcggtcagcaggcctgcgcggccgagggcgcgcgcgtgggcgcgggaaccggcgatgtcgtcatcggcgagtcgccagtcgaactgcgtggatttcgacagacgggccagctcgggcgacggtccggaagtgaagcggccgccccacagggcgaggtattcggtgttttcagccatgcgatactccttggagaatgggcatattcgtgcggtttcgactgtctgccagactatcagcgttgtgatacattcccgtggcggctctccggtcgagcggccagatatacacaagcgccagcaggaatggcaccgtacagcgttacaaaaccgtcagagggcgaatcgccagtgcgagacctcctcgtcgatgtcgaacccgccttcgagcacgaactgtttcaacagtttcgacgcctgtactttcactttgaaattcggcagcgtcacattcatgcatcgctcgaagaacgatttcgcccgtggcacgtcgatggtgtcacgcaaggcgtcgaatcggccgaatgcgttcagacttttctcattgatatatctgacggtgagttcttcaagcaacgacctgtcaacgccgagatgatccacgagcttgtcgatctgctcatctttctctcgtttggcatagcgcgtgatgtagtcccgcagcgtcatgccttcctcgacttccacatcgccacgctccacatcatgcaggaacagctcagcaagtcgttgttcgtccctcgaaagcgcagcgaaggatcggtgcagctgtgcggacatctccgccaactccggactgtcctccttgagtgccttgagccatttgacgaagttggcattcatgtagtcggtgtcgatcagtccggtgtcgatttcggtgagatacccttccagctcataaggcgcttcggggtcacatctcccgtcatcgtccggttctgcggcgcagctgtcatcatcgaacagctccttataccgctgggcgagaatcagatatgtgcgttcgtcaatttggggacgcacgatatcaggttcgccgttcccgccatcgttctcatccgcatcgtcggcatccgtgccatcgaccttgtattccgtggtgttccagtcgaaaccctgcactttcgccgcttcaaggtaacgattcagctctacgaactccttggcgaacttgcgtctggcctccaccgattccggcagctgcatgaggtccgattccccgttatccgtgaacacgtcgagaatctccaagtaccgtgtatccatggatttcacgttcgcgggcagtttctgcacgaacaaatcaagcggcctgtcgccggagtacagtttcaccgccgcttcgatgaagccgtacatggtgtgcggcttgcggtagtagcggatgactccgaacggcttgtccggcccgaacaggcggttcgtgcggctgaacgcctgaatgatgctttcgtagtcgatgatcttgtcgagatacagcgtattcacccattttgagtcaaatccggtgagcatctggtccacgacgatgagcaaatcgagctgctggctgcggttcgtcgatatgctgccatatgggcttttgtgcgacaaacgcgatgaaatgtccttcttcatcgccggccatgtggggatgatgaactctttgccgaacgcctcgttgtaatcggtgatgatttcagtcagcgcatcttctttgtccgttgctccttcgttgttgtcgatgttgggatcgaacaacgcagttacatgcaacttaggtgcttgctgcttgaacaagtgataatagttgacagcttcaggaatggagctagtggcgagcatcgcatggaatttgcccgcatggctgagcaccgggaactgttcgagaatgtccgagaccaccatgttcggatgcggggagtcgatgccatattggtctcgtccaaggaaatcctcgatgccactgatacggtttccagcgccatcaaccatcggccccatagggacctcggatttatccatgtaatgctgaaacaccttagctttaatggggtcagcaagtgcatcttccgtactctcagctttcgccttgtcgagagccacggcacgtctgacttcagaatccttgtacgtggtcaccatgtacggatcgaatccgagtacattatggtcacgaatgccgtcggcgatgctgtaccggtgcaagcaacggccgaataccatggcggtggtggaattcttcttctggttttcgtccaggatgggcgtgccggtaaatccgaagaacagcgcgttcgggaaggagcgccggatgacttgcaacatgtcgccgaaggtggagcgatggcattcgtccacgatgaagacgatgcgtcgtgcagcaagttgatccagccatgtctgggtgacgccccgctcccctgctttcacgttgctcatcttctggatagaggtgacgatcagggtgtcgttgacattggtgctgttgagtttgtcccgcaaaacaccggtgttctcggtaccttgcacttccgtctcgctgtcggcaaagctgcggtactccttcaacgattgagtacccaattcaatgcggtccatgagaaacacgactttatcggcgtcatgcgaatcggcaatgagctgagccgatttgaagctggtcatggtcttgcctgaaccggtggtgtgccacacatagccgccgggtcgtcctggggtaactggccgctgttcccaatcacatttcctcaccacatcggagatggcgttcgctgcgaggtactggtagctgcgcagcaccttaaggcatccatccgccgagtcggcgatggtgtagaagccgatgagctggtgcgccatgggaatggacagcaggccggcggtgccggaggtgccgccgatgaacagcttccattcgtctttgcctgggtgttgcccgccacagataggctcgttgttgtaatccgcccaatggaagtaatagcttgggttgaatttgtccgcgccgggattggcgaagtagacggcgtcgtcgggggtcatggccacgaagatctgcacgagacggaacaggccggtgaacacgccttcgtgcgcgtatttttcgatctgattggtcgcttggctgacgggtatgccgcttttcttgagctcgatatggatcaatggcatgccattgatgaggagcacgaggtcgccgcgccgcgagttcagcatcgtgttcttggctggatagaccggttgctgaacgatttggtaggtgcttttgcctcccgcgatctccttgcggtcatagatgtagagactgacttccttgccgaaatgcgccacatcttctttgttgtcacgcgtgatagacacggtacgcccgttgacgaacgaattgagcgcgagcggcgttcgcagggtctcgatctgctcgattatctgtgccatttccccgtccgtcagcgggtatttgccaagcctgtctatgtcgttgttgttgcggtacagtatgtctttccaattgtcgagcaaatcccgctcagttggatagcgcaggacaccgtccttccatccatgctgcttaagcacggtgatgacgttttcctcaaacaccgattcgctatcgaatatcatgattcttctctccccgaacttcccagtgtcctgcctttcgcgagccgacgcgcttaagcaatccacacccaatgagtatttcagcatctctccgcacagtcgctgatgagactcccacggcacgcgccatatcatcgtatgtcgcgctggggctcttctctacaaaatgaagaatgactcgctgtctctcggttatctgctcattcaaaccatttaactgctcattattgtcagttatctgctcattcgaactatttatctgctcataatcgtcagatatctgctcattgttaccaggcttggcacccgcctccaacatgagcgtgagtatcgtgcgatcagcttctccgaagttctcttcaatccgtggttcaggaagtcctgcattcgcccatgtggcgaacacatcggggacacccgtaccagctcgctcgcccacatcgattaggctgaacatcttcatgacaagaccgttgcgcggatcagacaccccgccgaggcgcatctgctcaatgccggttcggatatcacccggattctcgaacaccagcttgtcgggggtgcgcctgaccaccacaccacgcacgccatagtaatcggcgttgaacaagcagttggccaacgcctcacggaccgccttatgcatgggagtgtcatcaacgcggaaaatgccgtcgagcttgaacggggtcttcagggattcggcaagcttgcggttcacgcggaagaagaaatcgaacaggttgcccgaccacataccatctcccgaatgcacacgatcggtccagcgaatcgccgggtccagagtctcctgatagtcaagataatactgcgggcattcgcgcacgatgtcatagtcgttgccgaacatgagcaggccgccgaacgtgggatgcagcctgccatcctcacggcttaccgccgccgcgccaatggcgcgtagaaaacgctcgtcatcaaggtccgtccatgaactgccctgacgtaccgtgcggaaacgattgcgatacgcccgcactgtgtctgtattgaagtcggcaacagtgagatcgtccagcaccttggaatccatcgtctcagctccctgatcccggagcattgctgagatctcctgccgcgtgcaacggtagtcgccctcaccacgccgacggtaggttcccccgaagagatcattattgatatacacggggcgttcgtcacgcggagcgcgcggaacgtgaatagccagcactatcccaccatccgcttcgagcacttcaacttccgattcgatgggcagcacggcgctcaccttggaccggttgctgaccgtgttccaaaagtcctggcgaagatgttccgcttccactggtgtgagcccgactgtttcaaatgtgccgtcttcacgttctttgacaccaagcaggatgacaccgccataggtgttggcgaaggcggaataggtctcccacatgctgcgtgggagaccgcctttcgctgctttcgcttcaatccggttattctcgcgatatgaggcgagcttcacgatatcgaatgtctccattgctctacctcccctcacacaaacatcttgtcgagcaaggatttcttgatattctgcagcaattccaacttacgctgatgaagggtgatgagggagtcgagcttagcaaagaagtcgccaatttgctgttgttcgacggtgcttggcatatacaaaagcatgtctttgatcttgccaaagtcaacactttctacggttgttccagtcttgccaaactcaagcagcaattccttgttatgcgaaataaagaactgaagtagccattctccacagcactcgccttggggcagaatgacgcgaatatcctggttaacagttgaaggtttgcgcagttcagccaccggaagggtatggcgaagaatcccgctcctcgttaccattactaaagatccggcaggataaagagtcaactcttttgcgcccttctcagttatatgagtcgtagttctatcaagataattagatttcacgtcctgggacgtaacccacagtacgtatccatcttcatagttatcgggatctgccattggcggagtatgcccgccgccaaacgttgctacttcgcccaacttacgctgttcccaagggtcagtaaaaccagcaaagcgaatttcgggtacagactcaccatctttcgggaacattttttcaagcatcgattttttaaagatgacaagcttgtcatacttacgctgatgaagggtgatgagatggtcaacgctctccagacaagctgaaattgcccgctgctcttcgagatttgctggcattgtggcttcgatatccgcaaacctgtcatatttcagagtttgggtatctttcgagtttccctgtgaatcgcacaggtatttatatagcatctcaggccgcttcagaagatagccaaaacaagtcgagtctaactcgatggtgggcctagcaactacgtaagctgggctaacgataccatcgtaatcacttgacccaacggccccctgccacattcgcatgctgttgtagacaacatctcccttgtgaaccactttgtaattcacaagactcgcacctggatttgtatccctatccgattctgatgcaggatatattcctttagctacactgacagatagaatctccattgacgatgagcgttcattgctttcgaagaatagctcgcccaacttacgctgttcccaagggtcagtaaaaccagcgaaacgaatcgcgggtactttcacctgttcagtcatcattcacctcccaacagggtcttcagctcggcaataccggccatatcgaactcattgccggttagttgaccaagcatattgccaagttctgcctcagcctgttcgatctgttcgcacacatcagagtatgtggtcgaatacttgtcgttcagcgcattcaccgctgcaatcaactcatcaacagccgtctgagggagctcctcaagcttgtgctgcaatggttccacccacttggcagcaagcaagtcatcagcatgttcatcgctcagtccttcaataacggtccgggtcttttcatcaagcgctgaacggagattcttaacgttctttttgacttcacgctcttcatcaaacagccgctgtgcactcacaagagcacggtcaaagtcagtctcgggattcttcccaatcgatttcactgctttcttcaattcagcggcaacgaaagaatctccatcctcgctgacggcatcagtcgaactcttgtcatcctcatccagattttcaagaatgtcagcgatttcgccgccaatctcactcagccgagattcaaatgtggcaatttccgcaagatcagaggtaagaaatttcccctgtacgagatcgaacggcagaatatgcccgacccagccgtccggcacttcgacatccttaccgcctttcttcttgacgaccatattggcatcgactttgcgaacggcgtcatgtccctcggcctgtatggtttcaaggtcgatggagatagtcttttgccaactatcgtcaagcacctgatacgccgcataggcgtctacgagagggataccagccaaacgacgcagcagatcatttgtcagagtctcctcttcggcggcaatgctcacattggcggcattacccaccaattcaccgcgtatataagccggataatcgatgaacgcctcatgataacgctggatatatgccttcacatctgagtcggcattcaccgcctcacgaacgtcttgcacggcgagcttggccgaatggccgttctcctccgcgaaaaggcaccggcgtagtccggggaacacgttccaatatttgctgagtgcatcgatgtcccgcttaggaatgccgccgaacatagtggaatacacatcccagctctcggcattgtcggaggaatccacgtagcgaggaatattgaggttatagtcgttctgccgaatctcatcgatacccaccaagcggctgaacttatcgacgtcacgattccctgtcaccgcatccacgatgcgtttgatatcgctcgcacgcagcttgttgttcttgccttccttggtgaagtatttggaagcgtccacgatgagcacatgatcgtcgtcgcgatgtttgcgcagcaccatcacgatggtggggatgccggtgccgaagaagatgttcgcgggcaagccgatgatggcctgaatgtggtggttctccaccaggttccggcgaatagtgccttcctcaccaccacggaacagcacgccatggggcaatacgatggtcatgatgccgtcgtcgcgcagatggtagaggtcatgcagcaggaaggcgtagtccgccttggacttgggcgcgatgccgtattcgaagcggatatcctcgccggcctccggcggttcccaattctgggagtagggaggattcgagaccacagcgtccacgaacagcggctcataggtctcatccttggtctcgtcggtgtcgaaccacggccagtcacttttcagtgtgtctccgttgcgggccacgatgttgtccggcaggatgccgcgcatgacaaggttcatgcgcgtgaggttgtaggtgttctccttgagttcctgcgcgtaatacctgatgtcattcgggttgccgttgcgacgggccaccgcctggccgatgtggatgagcaacgagcccgaaccgcttgtggggtcataaatgttgatttcctcacggccggcgagatgccaggccacgatttcgctcatgagctgtgagacctcgctcggcgtgtagaactcgccggctttcttgcccgcgttggaagcgaaattgctgatcaggtattcatagatgaagccgagggtgtcgtagtcctgccggctgtccatcggaatgtccttgatgaggtagatgaggtcacgtgcggccttgctgcggcttttctcatcggtgccgagtttggacaggccggtctgcaaggtgtcgaagatgcccgcgaacacgcgcttgcgggcagggtcgatgttgcggtcgaacgcggaaagcgcgtcgcgcacattggcgatggcgaaatcccccttcttcgccacccatgtggagaacaggttatcgtaggagatgaagtagccgcacagatcgcgcacgtactgcgcggtctcggtatcatcctcccgcaattcttcgaggtcttcgtcccccatgccatcaacatgcagacgagtgacttcggtctcggaaaggaacttgtagaagatgaagccgaggatgtaatccttgtattcgttggcttcgatcttcgagcgcattttgttggccgactcccagatcttggcggcgagctgctgcttattcattcatatgctccttgcttctgtacacataatcaagggtctgcccctgctcattgacccattcgatccacccgttttggctgccgccgagaacgaatacagcggcggaggagggactggacagctcgacatcgtccgcaagaatcactttgcctgtctgcgcggcgaaaagctgccgtcgagctgccacggctccttgatttttgatcaccgcatgaccaaggtccacctcggagcccgaaagaaccgtgaaacggccggtatcccggttgtatcgtccagtcgcacgcacgccattcttcttggtgtggaacacggtattcactgcaaccggcgttgtctccttgcggtcgagatcatatccgagcacgcgcatgcggaaaagaatgctgccgtgcaggtcctccacccgctgctctttgtatgggttcatgcgaggagcgggagtattcccgttatcggtctcatatgagccgtgttcacgcacgtaatcgatggccttcgcctcaagcgaatccagaacatcacggtcgatattgacatcgttatcgaggaacatgatggctttgttccagaactcctttttggtcttgtgcgcatcaagtctgacaagtcccctcgtggtttgccccgcgtacacacgactcagcacaccatgatcctcatcaagcaggtaatacacaccgcggtctggcagatcgggaagacacttcgcctcgcccaacatgtctctgggcaccacgacagtgacaagcgattccccgtccacccggcaaatacggataccatccggattgttgtcaattatttgtatggtcatggcggtgagcgcaatcaattacttgccgcccttcgccaactcattgatcatgcatgtccttacgaacgccgagaagctcattcctctcagagacgcggcttctttggcggaatcccgcaggttagcgggaatgcgcatggtaactggcaccacgtcaccgtctactagatatgagcgtatctctgtttcaccagcctcatgttcaatcaaatcggagtacgtcatcgcatcccacgctttcaaaccgcagtataaatgcattaattatatacccgcttgggaacagcgtaagttgggagacgttgcgtcttcatttgattacggcttgaacgctgctgcaacagaatacgatggccaaaataaatatctgcgtatcaccgacattgatgacgaaacccatgagttctcgaaaagcgatcttacgacgccgttagctgaccttgcaatgagtgcagattatttactgaaagagggcgatctgctctttgctcgcacaggcgcgagtgtaggaaaaacatatctgtacaggcaattcgatggaatggtctactttgctggattccttatccgtgcccgaatcggcgaaggcgctgaccccgaattcgcctatcaggcaaccttgaccgatgcatacaagaagtatgttgccataacctcgcagcggtccgggcagcctggtgtcaatgcgcaggaatacgcagattatcaattgatgcttccttcaaaaacggaacagcagcaaatcgggatgacattgcgatctctcgacgacctcatcacccttcatcagcgtaagtatgacaagctcgtcgtgttcaaaaaatcgatgcttgaaaaaatgttcccgaaagatggtgagtctgtacccgaaattcgctttgctggttttactgacccttgggaacagcgtaagttgggtgaacttgtcgttattgaacgaggtggttcaccacgtccgatcgatgaatacataacggatgacaccaatggtttgaattgggtcaagattggcgatgctccttcgcttggtcggtatatcagtaagacctccgagaaaataaaacctgagggcctgagcaagacccggcaagtgcaccctggcgatttgattctgtccaattcaatgagctttggcagaccatacataatggcgatagaaggctgtattcatgatggttggttgttgattcgggatgagccgaaaagctttgatccaatgtatctttgccacatgcttggtaccccgaaaatgctcaatcagtatcgtatgctcgcttctggaagtaccgtcaacaatctcaacaaagagcttgtcagcaatgcaagtattctcatgccatgcaagtctgagcaaaaagtaattggccagttcttcaatcaccttgacgacctcatcacccttcatcagcgtaagcgcgaaagccgcatcatccgcgtgcgctcattcatatggttagctggtgatatatccggcatcggcgtaagcgcatatcaaccagaaaagagaagactgtatgaccgaaggcaacaccaacgccgaaacgttgttctgcgattactacgagcaatggatcagcgtatacaaggaaggtgcaattcgtgaagtgaccatgaaaaaataccggctcacgcaggcatggttgggccggctcattcccgatctcaaactcgccgacatggatcgcgtgaactatcagaagctcatcaacggctacgccgaacatcacgagcgccagacgacgatggatttccatcatcaattgaaaggagccattcttgacgcggtcgacgaagggctgattcagcgcgacccgactcgtaaggcaatcatcaagggcaagccgccatgctcaaagaaaacgaagtatctcaatcagttcgagcttcatgcggtccttgcggatctcgaactcggcaagggaccaagctgggattggctgatactgttggtggcgaaaaccgggttacggttctcggaagctttgggactcacacccgacgactttgatttcgtgcatcagaccctttcggtcagtaaaacgtgggattacaagaacggcggaggattcgtccccaccaagaacgcatcctccgtacgaaaggtgcagctcgattggcagcttatcatgcagctctcaacgctcctgaaagatatgcctgcgagcgaccccattttcgtgaatggcaaggtgtataactccaccgcgaataatatcctcgccaggcattgcgaacgggccaacgttcccgtgatttcgattcatgggttaaggcacacccatgcctcgctgttgttgtttgccggcgtatcgattgccagtgtgtccaagcgacttggtcatgcaagcatgaacaccacacaggacacttatcttcatgtcatccgcgaacttgaaaacaaggatgtcgatatcgtgatgcgtgccctctccaccctcatctaaccatttcaaccactgccgcttacgctgatgaagggtgatgaggtcgtcaagatgggagaaaaaggagccgatagcctgctgctcaacaagggaggggagattgacaggcatggtctcaagctgtctacccgatatttccaggaatgtcgatcctgaggctttttcctctgcccacttcttgattctctcactcattgaatagacaaaataaacatcggcatcgcctattacaagagactgaaacccttggttcgtgcatgcagaatgacgcagtattgcagtgtttccaatgcccgcacggctggtgaaaagaatcgtcttatcagccggcagcatcttagtagaacagctatcaaatcccgcctgagtgattttgcgagtgctgctttccgcatatatgttgttgcccaattcagctggagcataccaatcgatatcgccatcccagtaatttgaattgttcgtatcgggagtgccaccacccacgatttcagcaatgtcaactaactcacgctgttcccaagcgggtgtacccctgtcatgtcagttgtcctcaagtaaggcaaaggctcccctgcgcatatgcgcaaaagagccttgcaaatcagcgggagccgttcgtcgatattactcgacggtgttcttcggcacctcgatgccgttgccgaacttgacgtcgcgggcggcggccacgcgggacggcaggccgtagatgtcgatgaagccgttggaggacttctggtcgaagctgtcgccggagtcgtaggtggcgaggttgtagtcgtacagcgagctgtcggagcgacggccggtgacgacggcgcgaccgccgtgcagcaccatgcgaatctcgccggagacgtacttctgggtgtcctcgatgaaggcgttgagcgactgggtggcggggctgaaccactgcgcatcgtacaccagctcaccccagcgcttgtcgatgtcacgcttgatgcggtgctgttcgcgctccaggcagcagttctccagctcctggtgtgcggtaatcagagcaacggcgcccggggcctcgtacagctcgcgggacttgatgccgaccagacgatcctcgatcaggtcgatacggccgatgccctgggcgccggcgcggcggttcatctcctcgatggcctgcagcggggtgacgtcgcggccgtcgatcttgacgggaatgccttccttgaactcgatgaccacttcgtcttcgacgggcgggaacgccggatcgtcggtgtaggagtagcagtccttggtcgggccgttccacggatcctcaaggaagccggtctcgatggcgcggccccacacgttctggtcgatggagtacggggacttctcggtctgggtaatcggcagcttgtgctccttggcgaacgcgatctcgacgtcacgggtcagcgacaggtcgcgaatcgggctgattgccctcagggtcgggtcgatggacgagatggaaacctcgaaacgcacctggtcgttacccttgccggtgcagccgtgggagatggtgtcggcgccgaactggtgggcggcgcgcacgaggtgcttggagatcagcggacgggagatggcggagaccagcgggtacacgccctcgtacatggcgttggccttcagggccttcatgcagtactcgttggcgaactcgttgcgggcgtcaaccacatacgcctcgacggcaccgcaggcgagcgcacggttcttgatggtctccaggctttcgccgccctggccgacatcgagggacaccgcgacgacgtccttgccggtacgatccttgaggtacgggatggccacggaggtgtcaaggccaccggaatatgcgagtacgattcggttgttgtctgccatgggatgcctttctacaaaaaacgaactgctgcaagtatatacgaatgtctgtatatttatgcaatcggtgtggcgaatactgaaacaggcccttcccgagcgattcagttcttcgacgcgagcgtcagcagccactgcgagcgctcgaaggcgatgtcgtcctcggcacatatcaccatcaccgtgtcatcgcctgcgatggtgccgagcacgccgtcgatgggttgcttgtcgatgacgctcgccacatactgggccgcgcccgaaggcgtgtggatgacgaccaggttcttggccgacgcgaccgatgtgaccaagccgctgagcacgcgggacatctgctgctcggccttggacccgatgccgctgccgaccgattccctgagcggacggtcgccgatcgtataggcgatgctgccgttggacagtcgcgtcttcattgcgttgatctcgtccagatctcggctgagcgtcgcctgcgtcacctcgatgccctcctgggagagcagatccgacagttgcgactgggacgtgacgatgtgcttgagcagtacctgttcgatggcgctcaatcgcgcggcacgtgtggccggccgctgcacgggaggtgtcgattcactcatttatgccctttccggtggcttgccgaacgtctgcgcaccctgcaagccacccgcatactacggcatcgagcattaggccagcagcgattcgtcgccccgctgctgcccgatcaaccaggtcaacagcgccttctgcgcgtgcagacggttctcggcctcatcccacaccacggactgcgggccgtcgatcaccgacgcggtgacctccttgccgcggtatgccggcaggcagtgctggaacagcgcgtcgggcttggccagagccatgagctcgtcgttcacctgataatcccggaacggcttggagcggatggcgtactcggcttcctctcccatcgacacccacgtgtcggtgaagatgcagtcggcgtcggcgaccgcctcccgcggatcggtggtgaccagaatggagccgccgttctcggcggcgatccgctccgcgtcggcgacgatggcaggatcgggaagatacccgaacggaccggcgatacggacgttcatgcctgcggtggcgccgcccagcagatacgagttggccatgttgttggccgaatcgccgagataggcgatggtcttgcccggcaaagcatccacaccgccacgatgctgcgcgatggtgagcaggtcggcgagcacctgacaggggtggaactggtcggtcagcgcgttgacgaccgggcaggtggcgtatttcgccatctcttcgacgcggtcctgaccgaacgtgcgccagacgatgctgtaggccatgctggtgagcactcgcgcagtgtcggcgaccggctcgccgcggcccagctgggaaccggacttgtcgatgaccagcggatacccgccgagttccgccacgccgatggagaagctggaacgggtgcgggtggagggtttgtcgaacagcacggcgacggcctgggggccggcgaacggctgacggtagaagcggttctcgcggaatttcatgccgagttccagaatctgcttctgttcggcatggttgatgtcgtcgtcacgcagcatatggcgaagttgaccggccatgaggtgctccttctgtggttcgggatgggtgcggatgttgtatcggcttgggcgtgcggggcgggctggttgtcgcggcccgtcccgtaatcgtcgtggaggtcagtcgttgggcaggtcggcggggatcttcgcgaggatggacacggcttcatcgatttcctgctcggagacgatcagaggcggtgccaagcgcagtgcgtcgggcgcgaccgcgttgacgatcaggccatgttccagggcccagttcatcgccgcatgcgagcagcggtgggacaggaggatggcgttgagcagaccgcggccgcgcacggaggtgaacagcgggttgccggatgccatgacgtcctgacgcagttgctcgccgcgctcttcggcgttctcgaccagatgctcgttctcgatggtgtccagcgtggcgagggccgccgccgcgcccaagggattgcccgcgaaggtggagccgtgggatcccggcgtgaacagcgcggacagcttgcctccgaatgagatcatgccgcccatggggaatcctccggcgacgcccttggcgaacgtcacgatgtcgggagtgatgccgcccgtcaggtcctcgcgctggaacgcgaaccacgagcctgtgcgaccgatgccggtctggacctcgtcgatgatgagcagggcgtggttgatgtcgcacaactcccgcaccttcttcacatatgcgacgtccagcggacgcacgccggcctcgccctgaatgagttcgaggatgaccgcggccacaggacccttgccatactggccgagtccggtggcagagaacgcctcatacatcgcgatggggtcgcctgcacgcacgaattcgatgttcggcaccagcggctcgaacggcttgcggatcacgggcttccacgtggcggacagagcgcccatggtacggccgtggaatccatgggtgagcgccaggatgcgcgccggcttgccgccgatgctcgggctcgcgcccggcagcgtgcgaccgtacagcttggcgagcttcagcgcagcctcattgccttcggcaccggagttgccgaagtagacgtgggagccttccggggccccggcgagcgcaatcagtcgcgacgcgagcctgatctgcggctcggtcgcgaaatagttgctcacgtgggcgcatttcgcggcctgctcggacaccgccttcacccatgcggggtgcgcgtagcccagcgaattgacggcgatgcccgcgaggaagtcaaggtattcgttgccgtccacgtcccatacgcgcacgccttcgccgtggtccatcacgcgcagcggcgtgccgaacacgttcatgtggacctggctgtactgtcccagccattgcgagtcggtggggccgagcgtttccttagtaggcataggaactcctcatttcgatgccatcatcgggcacaaccatggtgccgatgccggcggtggtgaaaatctcattcaggatggaatgcggcttgcggccgtcgatgatgtgcgcctgcggcacgccgccatcgagggcgcggacgcaggcctccatcttcgggcgcatcccggattcgaggtcgggaagcatgtcacgcaggttctccacaccgacgcggccgatcagcgagttcttgtcgggccaatcggcgtacaggccgtcgacgtcggtcaggatgatcagcttcctggcgccgagtgccgcggccagcgcggcggcggccgaatcagcgttgacgttcagcacttccgtggcgtcgtcctcatcgggggcgaccgaggagacgacggggatgcggccggccgagatcaggtcctccaccgcggaggcgtcgacgctcaccacgtcgcccaccagcccgatgtcggtaggcttgccgtcgatgatgggtttacgctgcatggcggagaacagggcgccgtcctcaccggacagtcccacggcgaacggaccatgcgcgttgatcagtccgaccagttccctggacaccttgccggtgagcaccatgcgcaccacgtccatggcctccggagtggtgacgcgcaagccgcccttgaactccgacttgatgcccaatgccttgagcatgtgcgagatctgcgggccgccgccatggacgacgaccggatgcaggcccacctgccgcagaaacaccatgtcttcggcgaagcaacgcttgagatgctcgtcgaccatggcgttgccgccgtatttcaccacgatgcgctgcccggcgaactcctccagccacggcagcgcatcgatcagcacctccgctttctggtcggcgcgcaggtcggtgtgcacgtcgaaatggaaccctggtcccttcagttcagtagccatattctcctctatcgcatcccgcttctccggccggcatgtgccggggaggaaccgggagactagctttcgtaatcggcattgatatgaacgtactcgtgggtgaggtcatcggtccacaccgtggcctgttcgtcaccggcgttgagatcgatgtcgatgtgcacctcgcggggggtcatgtcgacttcggagcggtcgcgtcccgcgcccccattctcgcagatcctcacgccgttgacgtccacggtgaccttctgcgaatcgtagggcgcctcttcgacgggcacggtgcccagcgaggatacgatgcgtccccagttcgggtcgttgcccgcaatggcgcatttgagcaggttcgaggccgcgaccgcgcgggcgcaggccagggcggcgctctccgtggtggcgccggtgacggtgatgcgcacgtcgtggctcgctccctcgccgtcgccgatgatctgccgggccagcgatgcgcatgccttggcgaccagggcgttgaactcgtccggatcgggctcaacgccggacgcgccggatgcgagcagcagcaccgtgtcgttcgtggacatgcacccgtccacgtcgatgcggttgaacgaatggtccaccgcggcgttcagcgcagcctgcagctgaccggcgccgacggcggcgtccgtggtgatgacgcacagcatcgtggcgagctggggggcgatcatgcccgatcccttgaccatgccgccgatgcggtatccgtcgccttccaacgatacggtcttcggcttcgtgtccgtcgtcatgatggcgtgggacgcgtcgcttcccgcctggtcgtcgtccgacagggccacgtacgcgctttccactcccgacagcacatgatccagcggcagcagctcgccgatcaggcctgtggagcatacggcgatctcgtcgggctgcgtcccgacgagctccgcgaccttcttggccgtcgccgccgattgctcgtatcccgcctggccggtgcatgcgttggctccaccggagttgaggatcaccgccttgatatggccgtcggcgaccgtcttgcgggaccactgcaccggtgccgcgcagaatcggttgaacgtgaacacgccggccgcgctgtcgagcggcccctgattgacgaccagggcgagatccttcttgccctcgatggaggagatgcccgccgcgacgcccgcggcgctgaatcctttggcgaatgtgacactcacggtgctactccaatcttcgtaagtcccttgtcttcgggaagtccaagtgcgacgttcagcgactgcacggcctggcccgcagtgccgcggttcaggttgtcgatggcggcgaaggcgatgagacgcccggagtgccggtcggtgaccacctgcacgtgggcggcgttcgatccgacgacgttcgccgtggccgggagcgtgcccggctccagcagcacgatgaactcctggccggcgtatgccttggcccacacgtcgtggatttcctcgtcgctcatggaaagcgccttgtcggtcatcttcgcgctgaccgtggcgaggatgccacgcgccatcggcgcgagtatcggcgtgaatccgagcgtgaactcctcggcccgggcggcgtccaaacctgccgcatgggcgaagttctgcaaaatctcggggatatggcgatgcgtgccgcccacgccgtagggcacggcggagccgaacgcctcggcggcgagcaggttcgtgcgcttgaggttcttgcccgcgcccgaataccccaccaccagatcggcgacgaggtcacgacgttccacgagtccttcggcgatggccggctgcatggcgagcgtcgtcgcagtcacgttgcagcccggcccggcaatgcgcttggcgccggggagcaggtcgcgctgacgcgtgtactctccgtctgcgctcttgccggtgatcagctcgggcatgccgtacgtccaatggtcgaagaactcgcctccgtagaacgcgtcccacgcggagcgctcctcaagacgatggtccgcacccaggtcgacgaccacggcaccggggtcaagctgcgcggccaacgccccggacgcgccgtggggcagcgccaggatgatcacgtcatggccgttcagcacttcggcggtggtgtcctccaccgtcagatccgccagctggggaatatgcggcatatgccgtccgagtttctgccccaccgaggaatggcccgccacgcaggtcacctcgaagtccgggtgggcggcaaggatgcgcaacgcctccccacccgcgtatccggtggcgccagccacagctaccgtatatctcgccatatcacgctcttttcatcgaagacgaactacggcgagtatacatgttatgcagtacattgcatatattcattcatcggcttgcgtgtcgcagcacacggcccatcacaccgaaacggagtcccccgacccgcttccgcccgtgccgggcgccagcatgttgagcatggcctggtacatgtcgtccatcgatatgccgtgcatcgtcatccatatgacgatgatggtggtcagcacgttgatgacgacggccgcgatggccagtccgcggccccgcgtatggaaacgacgggtgcgccagatggccaggcagccgatcagcgcgggcagcaccgggaacgaggacaccagggcgaaaatgaacgagaatatggcgtagaaatcccaatgcccgtaaatagggttctgctgcgggtcgttgaggtcgatgccgttgaaatatcggggaggctcccgtcggggaccgccttggtcgggcccaccctgagccggagccgcattgggggcggaaccgccctgagcgggagccggcccggctccgaacacggaggccggctgagacggcgacggctgcgcctgcggagccggctgctcgggctggcctccatatacgtaagggttgtaattcggcggaaactcatccgccctggcaccatattcaggctcgatgcgctgaccgtattgcggctgggccgcaacatgccgggactcgcccgaactatcgtcagacgattgcggctgttgttgcggctctgtcatatgcatgtcctccatggtgccttttcatcggcggtcaggcgcgcagctgagcgccgatggcctccgccttgtcgacgatggccttgcgaatggcctcactgtcctccgcggacagtgtcttggacggggagcggaaggtcaccgcgaaggcgagcgacttcttgccctctcccacctgctcgccggtgaacacgtcgaacagctcgatggattcgaggttggcgccggccgcctcgcggaccacggcctcaagctgggccgcggtcaccgactggtcaacggtgaaggcgaggtcctgcttgacgggcgggaacgtggcgatgggcttcgcctgcacgggcttgccgtcaagcgtgccgaacagcgcggtaaggttcagctcgaacgccgcggagtgcgccggcagtcccagcgcctcgttgacacgcgggtgcagctctccgaccatgccgacgacctgttcgcccgcgacgatctgcgcggcgcggccggggtgccactgcgcgggcacatcctgcgcggcgggctgccgcagctcgtaacgcgcacccaaacggtcgcagacacggcgaacggcctcgacggcgtcgctccaatcgacggcgcgacgatcgccgagccatccggagtcgaccgcgttgccggtcagcaggccggcgacgtgcagcggctgatcgggaaggcccgcatccagcgcggcaagctgctcatcgctggggcgtacgcctcccggaagagccgggatggcgggcgcgttcggatcccacaggtacacgtggccgatctcgtacaggcggatgtcttcgaggcctcggcgcaggttgcgctgcacggtggtggcgagcgtggggagcacatcacgacgcaggtacgggcggtcgccggccagcgggttggcgatctcgacgctcaccggcttgatgaccgccggatcataggagaacgccttgaagtcctcatcgccgacgaacgggtagctcagcgactcgaccatgccgtattcggcaagcgtgtctgcgacccagcgctggcgacgctggtcgggggtcagcccgaccgcgcccttgaccggagccggaggcacggtgacggggatctcgtcgtagccgaccagtcgagcgacttcttcgaccaggtcgcacggctcgttcagatcggggcgccaggtcggcgcggacacggagaactcgccgttgccgccgccagcgacacggcatccgacatcggtgaggatgtcgctgatgcggttgacgtccacgtcaagcccggcgacgcgggcgacctcggtggccttgaaggggatcggacggcgatacatcgtcgtgttcacgtcggtcgggtgcccggacggctcgccgttgccgaacttggcgagcagttcggccgccatctgcgcggccgcgggctgcagctgcgtgtcgacgccgcgctcgaaccggcgggacgcctcggaggggatcttgtggcgtcgtgcggaacgtgcgatggagacgctgtcgaaatgcgcggcctccagcaggatgttcttggtgtccgcagtgacctcaccgtacaggccgcccatgacgccggcgatgccgagaatgcgcgagccacgcttgccgtcgggcgaatcggtgatcagcaggtcctcgacgctcaggtcgtgttccttgccgtcgagcgtggtgagcttctcgccttcggccgcgcgacgcaccacgatcggcccttcgatcttgtcaaggtcgtaggcgtgcatcggctgtccaaggtccagcatcacgtagttcgtcacatccacggcgagggagatcgaacgcatgcccgcgcggataagacggcggcgcatccagttcggcgtgtgattcgtcgggtcgaacccgtggatggcgcgggcgacgtagcggtcgcagccggtgacgccgtgaatcgggttgttgtcgtcgacgatgacctcgatgtcgctggagacgccggactccgccgcgggagcggcgggggcgcgcttgttgagctcggtcaccggatcgacgaacttcgcgccggtggaatgatggtattcgcgggccacgccacggtacgagaacgcatagccgcgatccggggtgatgttgatttccaggatcggctggtcgaggtgcagcaggtgcatcgcgtcgtcgccgggcttgagcgccttgtattcctgaggcgtgaagccgtagtcgcgcagcaggatgatgccttcgtggctgtcgcccaggccgagctcgcgctccgaggcgcacatgccgtcggaaacgtggccgtaggtcttgcgcggttcgatcttgaaatcgccgggcagcactgcgcccggcaaggtcacgacgaccttctcgccggcggccatgttcggggcgccgcagatgatgccgcgcggcaccttcttgccgttctcgtcgaccgcgttgtacgcggagccgacgtcgacatgacaccagttgatggtcttgccgttcttctgcggttccggcgtcgcgtcgacgacatatccgacgacgatcggaccggtgacctgggaggcgtgaatctcctcctcctcaagaccgaccctgaccaggtccttggccagctgctcgtaggtgaggtcagacggaacctcaacgtgctccttgagccaatcaatgtcaaccataggcatgggcttctcactcccccatcacaaactgttcgctgaatcgcacgtcgccctcaacgaggtcgtgcatgtcgttgatatcggaacgcagcagcagcgtgcgctccatgcccacaccgaacgcgaaaccggtgtactcctcggggtcgatgcccgcggacttcagcacgttcgggttcaccatgccgcagccaccccattcgagccagcccgcgccgcccttcttgtcggggaaccacaggtcgagttcggcgctcggctcggtgaacgggaagtagctcgggcgcagacgcgtcttcgcctcggggccgaacatggccacggcgagcttgtcgagcacgcccttcaggtcggccatcgtcaggtgcttgtcgacggccagagcctcgcactggtggaacacgggggtgtgcgtcgcgtcgagctcgtcggtgcggaacacacggcccgggctggcgatgtacagcgggacgccgcgggtcagcagggcacgcacctgatcggaggaggtctgcgtgcgcagcaccatgttggagccgacgaagccggccgcgtcatgggcctggttgcccttgacatagaaggtgtcctgcatctggcgggcgggatgatccgggccgaagttcagggcgtcgaagtcataccattcggtctccacctcggggccggcggagatctgccatcccatggagatgaacaggtcctcgacgtcctccatgagcttggccagcgggtggcgggcgccgagcgggcgacggttgaccggcagcgtcatgtcgacggtctcggcctccagcgcgcgctgctcctcctgcgccttgagctcggcctccttggggccgaacgcgcggccgaagtcggcgcggagcttgcccataagcttgccggcttccttcttctgatcgaccggcagcgacccgatggccttgctggccttggtcatcgccgattcggcaccggcgtattgcgttttgatggctttgagctcctccaagctggaggcgttctgaatcttgctgatgccctcggcgaccgcatcggtcactgactgggcatcgaagagagcattgtctgccacgagaaccctttcgtcctacctacctacaactaccgaaactaccggtttatctgcgccaaaaatcaaataatccaagcgtttaccgagttcacattgtccctataaggctcgacatagccatactcatgagcatgatcgcggcgctggtcgccagattcagcgactcggccttgccatagagcggaatgcgcacgatgtcgtcgcacctacccagcagacccggctcaagtccgcgggcctcgttgccgaagatcacggccttgcccaccccggagagatcctgatccttcagcgcctcgggcagctcccttggctcgcgcccgtccgtcccgtagacgtcggcggcgacggtgcggagcaccttctcgccggcccatccgaagaactcgtccacgcccatcgtcatcacggggatatggaacagcgagcccgcggtcgcgcggatcaccttgggattgagcatgtcgacgcaatcgtcgacgaacaccacggcatcgcatccggccgcgtccgccgcacggataaccgtgcccgcgttgccggggtcgcgcacctgccagaacgccgcgacgaacggctcttcgggcaattgcgtcccctgcgccgtcgcgcgcaccgcatcggcgtcgccaaccgccgcaatgccctggcaatcggggctgatgcggcgcatcaccgcctcgctcgccggatgcacatatatacggtgttcctgggatcgctcgacgatggacgtcagcgtctcgcctgcgatccgcggcccgtccggcccgtccgcggcctgcacataaaggtcacggacggcgtcgggcatccacgtcaccgcctcgcgaaccgactgggggccctctatcaggaaacgaccgaaacgctcccgggtgcggcggttggcaagatcggccaccttgcgcacgcggtcggccttcatgttgtctatcattctggaatcgatcggcatactgcaactgtacgcgccaagcgatacagcggtgcctggcgccacgattcggccggctcgccgcgtgcgtctctaacactggactaagaaacgctgtcaaacatcgactatggccggcgaacgggtaacgttgccactatgcaaatgttgttcacagcccgtagggtctcctgcgtcgtgccttctgcgcggtcagaccgcaccatcttcgagaatctgtcgttcgacgtcgatcgcggccagatcgtcgatctggtcggcccgtccggttccggcaagagcagcctgctgaccgccttcgcgctgctcaacccccatgccgacggcacgttcacgctggacggcgcggacagctcatcgttctcgctgcagcagtggcggaggaacgtcgcgtatctgccgcagaagcccatgctgatgggagacagcgtcgccgacacgattcggcttccctggacgctggccgtgcgcagagcggacgaggcgagtgcgcccgacgaccatgcggccaccggcaagaagacctccgcgagacgcggcaggttcagccggctgttccgctccgaacagtcgcaggcgaagctggcgctacccgaccagctcattcgcaatacgttggacgccatgggatgcgaggatatcgacctggcccgtgcgccgcacgacctttccggcggtcaggcggcccgcgtcagcctcgcgaggacgctgctgacccgcccggccgtgctgctggccgacgaggtggacgcaggcctcgacgacgacaacgcggacaaggtcgcctcgatcatggccagcgcggccgccaggggcatggccatcgtgcgcatacggcaccgtccgcccgacggccgagccacacgcatcgtcacactgtcctcagggaggctgtcatgagcggcaacggttacgtgatcgataattggggccttctggtcgcgctgctgatggtggcggtcgcggcgctcgtctccgagctcatgcgcatcagcatcggcaagacgctgatgtggtcggcgatacgcgcgctggtgcagctgtgcgtgatgggcgtgatcatcgggtacgtgatccgctccaacaacccgtggctggtgttcggcgtcatcgcggtgatgctggtcgcggccgtgcagatcacactctcccgcgccaagggcatcccgaaggggctcgccggcccggtactgctcagtctggtcataaccatgctgctgatgatctcgctggtgaccgagctggtggtgcgcccgcacccctggtatgcaccgcagctggtggtgccgcttaccggcatgctgctgggcaacaccgtgtcggcgctcgccgtcggcctgagccggttctatgagagcatgaacgagcgccgcgacgaggtggacacgctgctcgccttgggcgccaccccgtgggaggccgcccgtccttcgatcgtctcgtccatacggctgggattgctgcccaccaccgcctctctggcgtcgtgcggcatcgtgaccatccccggcatgatggccggccaggtcatcgccggcggagacccgctgaacgcggcgaaataccagttcgtcgtgctcgccgccatcgccgcgctcaccctcgtggccgacgcgctcatcatgacgatgacctatcggacctgcttcaccgacaaggaccagtacaagccgcccgaggatcgctgagccgacgggcgcgcagaagcgcgacttgcattgccgctgagccggcggaactcatccagctcagcggtaactgcgttctatgaggatgtcggagacggtcaggttcgcgtcgttgaccagattgaacaggatcactcgggccagttcgcccggatccatgaaggtgtgctgcttctcctccgacacgtagtcgcggctgtcgcggtagaacgcggtgtcgatgccggccacgaaccagccgtcggcgatcagccgtttggtcagcccgtatcccaatcccagtgcactaccagtgacgatagcgatgttgcggccgttcgagttcgtcatatcatgctccgatctcccatacaatgtatggtcagagtatcggaccattcagccccccgccgcaccggccacccgattggtcccgcgcagatccccgtcagccggcgaactgcgcggcggatgccgggtaccaccgcgcgaacgacgcgatgttctcctcgccgtccccgtgcaccgcggcacggaccgaagccagccggacggccatccgggcacggacgacggcataataccgggcgagccatccattgatcagttccatcatgcgagtcatcacactcaccttgcctttccatcagggtgtttcaaggatgcatacggtcacatgaacgacaaaatattaatttcgtcattctcgcgatgtccgaatcatcgattgagtccctctcctgcagcaagaagaactgatatctacgatagggatggaatgtaacgacgacaccggcgcaatgatacttttgcgcatcaaaagaaatatagtattttcatatacgttacatcacgcagggagcggcaatggggcacttcggtgcacaggcggcgcgaccgggcccggaacctggcagggcgggcaggaagtcattgtctcgtcggatctttcggagcggatcgactacaacatccccgacctgcccatatatgccagacgggacgcattgtcgtcgttcccggactaccgctgcccatgtcactggcatcgcgatctggaattcatccatgtcatcagcggtcagatgcactatttcgtcaacggcgccatagtgacgctggaagccggcaacggattggtcgtcaattcgagccggctgcattacgggttctcgccgcagcagaggcaatgctggttcacctgcgtggtggtcgacccagaactgcttgagcggctcggcgcggatgagcgggttttcgacggcgagttacttcatcaacgtgttccgacggcggcgaggcgtcactccgcgcgtctggcgtgagtcacgctgcgtgggtcacgtcactgtgcgtgggtcatgtcactgtgcgagggggcacgcacagtgacgtaaccctcgcacggtgacacgacccacgcacagtgacatacctgacagcggccacgaaccctctacagaatgtcggggtcgtccttgtcgatggtgcccgtggccttaccgatggccttgagcccgtgataggcgacgaggatgacgaccgtgccgatggcgatgccattgaactgcacgccctggaacgcgaacgtgaaatcggcgatgccgatgatcatcacgatcgcggcgaccatgatgttgagcggcttgtcgaagttgaccttgttctccacccagatgcgcacaccgatcatgccgatcatgccgtacagcagcgtggtcacgccgccgagcacgccgccgggaatcgtgttgatgaccgcgccgaacttcgggcacaggctcagcagcagggcgaatgcggccgcgcaccagtaggcggcggtcgaatacaccttggtcgcggccatcacgccgatgttctcgccgtacgtggtggtgccggagccgccgccgaagccggcgattgcggtaccgaggccgtccgcgaacagcgcggtgcccatatgcccgtcataatcgcgcccagtcatctgcgccacagacttgacgtggccgacgttctcggcgaccagcaccagcacgacggggatgaacatcggcaggatcgagaagtcgacctgcggaagatggaatttcggaaagccgatccacgccgcgtcgccgatggccgaaaagtcgacctgaccgcggaagcatgcgtacacatagccgacgatcacaccaagcaggatgttcagacgtccgacaagaccgcggaacagcacggcgatgagcagcacggcgagcagcgtcaccagggcggtgtcccagcccttctgccagttcgaccacacgctgggagccaggttgaagccgatgatcgcgacgatggcgccgttgacgaccggcggcatgatgatgtcaatccacttcgcgccggcgaagtggacggccacgcccaccagggcgagcagcaggcctgtgaccatgatgccgaagctggctgccggaatgcccttgcccgcggaggcgacggcggcgatcggggcgatgaacccgaacgacgaccccaggtagctcggcagcacgttcttgttgatgagcaggaacagcgcggtcgacatcgcggtgaagaacagcgtcgtcgacgggtcgaaatgcgtcaggatcggcaccaggaacgtcgcgccgaacatggcgatgacgtgctgggcgccgatgccgatggtacgggtccaggtcagtcgctcatcgggctccacgacctcgccgggcgcgagcgtcttgccgtcgccatgcagtttccatgtgaacaggtttcccatcacgaactccttcggttctctcaggtggcacatccatgcagccatgtgccgcgttgaggccattgtaacccgttcgcccaccgttgtgatgacgagccacgcgcggcgcgcgactcgtcatgcgcggcccgtgagcgccgtgaggcgcctcgtgccgtcacaggtgcgggtcgaccgaatgcaccacgtcgacgaggtcgccgttcgagagcaacgggcgctggaattcgcgccacggatcgacgcgcacctcccagcgtccggtcgactcgtcgaacaccgggcgcgcggtctgctcccagcgcacgcgcgacgacgtgcggccggtggccgggtctcgccgcgaataatgcaggcacgtgcaattggtgatcgcccatgccgggtcgtcggcgcggcgcatgaactcctcgtccgacaggtcctccagggtgagcatcagcgcgagcatgaagtcgccgtgcgtgacggcgacgacggattccgcctcagcacgccggttgagcgacgtgagcaggttatgcacgcggttctccgacacgtcggcaatagactcgcctgccggcggacgccagtacagcgggtcggtgcgcttgaacatccagttgcgcgcgtagttcgtgcggaaatcgtcctgcgtgatggtgttgatctcaccccaggagcgttcgcgtagcacgcgcgtctcctcccacttggctttcggcagcgccatcgtcgcggcggtttcgcgcgtgcgtacgtatggcgagaccagataccggtcgaacagctgctgttgcgcgacgagccagcggccgatgcagtcggcctgcttgcgcccggtggcggtgagtcgccacgaccggtcgggcacggtcacgttgtcctgcgtgtacagggagttatcgccctgctcccccgcgttgatgatgacgttcgcctccgactctccgtgtcggatgacatatagatccaatggcattcccatgaatgcgtttcctcatttcgttatcttgctatgttgctgtgtttgctgtcttgttgcgttgtgtttcgttgtcttctgtcgccgccgtcttccgccgtttcctgccgtgctgtcccctcgtcccgccgtttccgtcatcgtcagagcggtcctgccgtctgccgcgccctgcgggaatcgtaccgcttcgattcaagttcgcggcatggcttcgcgattcctccagattgctccagccttccccacggtacacgcaatcatgccgcttcgcagccgcgctcatgcccacagcgcaacaattcacgcacatgtcaccggtgattcaactgttacccggtgcccgtcgttccgtggcgagcaggacgctgaggcggactgcggaacgcgcttccttctggcatatggcgaccaggaccgcacgatacccgtcgaggatcaggatacggcccgacgggtgatatccggaacccgcggcgcgcggctgtgcacgtacccaggcatggcgcatgcgatctgcgaccgcgagatcgacgacatccgtgatttcctgagataggggctccatgccctcaaatacgtcagcgggctgaaacggaggctcccaggccgggagcgcccatttcagcccgctggcaacgcgatgccgggaatcagaagaacagcacggcgacgccggcagcgaacagcatcagcaggatcgacacgaggaagctcgcgaggaacggcttgcggcccttgaccgcgatggccttgaagttcacgttgatgccgagcgcggccatggccatgccgagcacgatgtacgcgaagtccacgagctgcggggtgatggcggcgatgaacggcacgaaggtgccgatcacggacgcgccgatgaagccgagcatgaaccaggggaacgcgacggagcgtttgccggtgggcgcgacctcggaatgcttcttctcccaccagatggcgatgatgatggcggcgaacacgagcatcagcacgcgcgacagcttcatgatggtggcgatgttgaccgcgttgaaggcatcgccggcggcgaccgcgtgggcgatctcgtgcagggacgcgccggcggtgatgccgagctggtcctgcgtcatgccggtcagggggccgagcgcgatctcaagcaacgcgaagatcgtgcccatgatggcgacgatggcgacggccatggttacgtcgtcgtccttctcctgctccttctcgggcggcaccttgatggagccggacaggcccatgacggcggcggcgccgcagatgcccgtgccgccggcggtcaggatcgcgagcatcgggtcgacgcccatcttgcgcgccacccagtaggtcacgacgatggtgagcgtcaccacgaccgcggcgatgggcaggcacttgatgccctgcgtgaacagcacttgcaggttgagcttgaagccgagcaggatgatgccgaggcgcagcagcttgttggagatcagcccggccgcgtccttgacgccggccttgcgcttgtcgccggcaccgacgtaccacttgcggatcgggaactggatgatcatgccgatcagcagcgcgatgatcagcgcgccgaacagtttgaatccggggtattgcttgagccatgagccgatcagtgaagcgatcagggtcaggacggcgatgaacagcatatcgacggtggcgatgcgtttccaccatttcgtacagaactctctcatgatgtccattgaactaccgtcgcattccatcagtcaaatcagtgatagtgatggatggtattgatatttttgatgccagattgcagcaaatcattctcaataagaaaggtgcgagccagacgcgggcggaaacgaacacaaacaccaccgaaagaccggaattccgggcttcgtcggcttgttcacttgtgcgaaaatgtgaggaatcctcgcacgtttcttattgagaaccattcgctgcgacacagtcagccgcgcagggccgcaatgaccctgccggcaagttcccgctgccccggcgtcagaccggaacgcggcaccaacgcatagaaccgccgcacgaactcgtcgcccagctcccgtgtcggcacgccggccggcacggcggccgccgacaccagggagcagccgaaaccggccgcgagcgccgcgccgatggccgcgttattggcgacctcgatcatgcgagacggcatgaagccgaccgtcttgaagtacagatccgtgtaatagcgcacgccggagccgtgctcgcgcaccatccacacgccatgcggatcaccggccagcaccagcctgtcctcgcgcagcgtgacacgatcgaccgagtcgttgacgatgggcttctccaccacacccaactgcacggctttcataccggcctgttccaggatcgcgtcggaattgagcacccgaatcgagcagtcgaagccgctcagcacctcggccatcaccggcagtgcgaccggcagcagcacggccgccgtggtgtgcgagaatgcgacggacaacggctcacggctctcgcgcatgcgggcgatctgctcgcaggcgtcgcgccacgtgccatcgatgccggtcgccgcacggtacagcaaccgcccagcctcggtcggcgtcacatcgcttttggcattgcggacgaacagcggcgccccgaccatgcgctccagttgggcgatgcgcgacgacaccgtggactgcgagaccttgagctcgtcggcggccaacgtgaactggccgatctcgtagaccgcgaccagagtgtccagcaaggggaacatgaaccgctcctttccgtcgtgttcggcaacgcctgccggaacgtcagtgcgtccgttccggcaggcgttgccgatcggcttgcatcatttgacctgcgtgatccggttgccgctgaccatgaacgccgttctcgccatgtcgatcatcggctggtcgaaccggctgtcggtgtagaactcgtcgatgaccgtgtccgggccgacgacttcgcggaaccgtttcggcttgttcgtattgaaattcagacaggtgacccgcatcgtccgcggatccacggtggatgagaccagacggttcaatccgagacgccggcatgcctcccccacggtcacgtcgaacgatgccgtcaggatcacgtcatccggacgcggctcataccacggcttgatgcggtccatatgccggttccagaactcgttcaccaacgcggatacgccctctgcgatcgcggcctccccggcgagaccggcatcgggagccgcgccgtccagtcgcagtatccgtcgggaagccgcgacatcgtgcaggtaatcgcacgtcacgccgcccacgccgcgttccatttgcgcaagcgtggcccgccccatcttgtactgcaccgcgtatcgcagcacctgagccagatgccgcagcaccttcggctcgtatcgggcactgaacatatacaggtcgaacaggctttcgccgccatatatcgtgccgtcgaaatcgaacaccctcatcgtgtctcgttccctctcaccctcgcgccgctcccggcccgtcagaactgcgcatagtccgcatccttatgttcccccgtctcaaggtaccgtgcaagatcgtcggacgacgagaacacagcgcgcaccgactgggcgatcatcaggttgatgctgtcgccgtcgcgcaggccctcgcgatatgcgtacacggggatgccaagagagtgggcgaatccgatctcgaacatcgtgccggaatcctcgtccatcagattggctatcaccgccttggaagcgcagatgccgttcacgtcgtcgtcgaagcagcccgcgggaccgacctcggcgatgtcactggcgaaccgcggcctgaacatcgtcttgccgtgggtgtcgagcacatgctccaagcgttccatcgacgcgacctgctcgggattgaagaacgggccagcgacgtagaaatcgtagcggcggcgtttgcgcgaataggctttctcgcgcttgcggccgggctcgcgatcgggttctcgcccgtccgccgcttggcccgcctctgcgcccgcatccggctccaccatctcggcgaacgtctgcttcatcgtatccagcagcgactgcgtgctttccggaacctcgtcgcccgctccggcgacgtccttggtgagtccctcgatgcggcgacgaatccggtcggcatcctgcgggtcgatgctgaacttcgccacgagcgactgccgtatcgtctcataatcaaggttgacgaagaagataagctgctgcagcttcatgaagttcttcagctcggggaaccgctcgacgatgtacgtctcgcgatcatccgtggccctcacccagtcgcgggtcagctgcatgctccagtcgccggtgatggatccgcggcgcatgcggtaatggtacagcgcttcgggaatgcgcacgacgcgatgcgactcgccgatcacattgcagatacgggccatgtcctcgatcttgcgcccgacggggaaggagaacccgtgattgcggtagatcgacgccgccgcgacgaacgaccagaaatacccgtcgatctcggccttgacctgcgccttgatcgcctcgatcggggtcatgatgatcacgtcgtcataatggttgtgcttgtacgaggatgtcagcggcttgccatcttcgctgatcgtgtcgaactggaacatcaccaaatcggcgtcatagtcgcgcatcgtcgccatcgcacgttcaatgagattgcgctcgaccatgtcatcggaatcgacgaagtagatatagtcgccagtggccttcgccagtccgacattgcgcgcatcggacaggccgccattggccttgtggatcacacggatccgctcatccctcgccgtccacgcatcgcacatcgcagggcagcggtcgggcgacccgtcgtcgacgagcaggatctcaagattgcggtacgtctggccgaccagtccttccacgcacgcgtcgagataccgctcgactccgtacaccggcacgatgaccgacacgagcggcgtggccccgtcaccattcatggcctccgccatcacattcgacgatgtttccgattccgctgacatgcctctcctcgatgctccccggtccgttcggctccactcactgctgacgcacggcggcacgtgcgtcgccctccattgtccatgataggccagggcttgcgcagggcggacgactccatcctgttgtttgccatatcttaaccgcgccgctcaaccgtgccttttacccgcgcggaaacggcggcagaacgccatgccggtgtgcgtcggccaccggattttccatccgccctgaggtcgcgtagacccctcccgtcagtcttttgacaccatgcagcattttgccgaaccccgcaaccgatcaccgtggcgggatgcttcttgccgtatatggccgtcagcggcgacagcgcggcgatcaagcagatgctcaacaacatgtccagcgaagagctcctcaaatactatgacggggacagctcgatcagcgcatcgctgttcaacgatcgcacattcccgttctgggcgttcctcgtgctgtcggcgttcatcctgttgttcgcgctgcttcgtctgcacgccgccacgctgacgttctccatcctcaacctgctctgatgcgctttgtacgcgggaatactcatcttcattctcgtctccgcctcccacgagatggatgtcgtacgctcgacggcatctcagcctgggctgaatctcgccaatgacctgtccttttcactcgttccgtcgtatgggatgtatgcgatcatcgcgggaacgttgttcatgttcgtgggagccatcgtttccgtggtgaatcgcagccatgcgcgcagggcggcattcgccagtccggctccggcgaatccgcccgcagtcgcgtacggtggcctgccggcgcaaaactacggagccgcgccgggcgccggagcggcgtatcagcagcctgccgtgccatatagcgcacaaccacagaatccggccggaggaacgccgaacacaatgcgtcccatgccactgccgccgcaacactaatccgcacaacccgcagactccgctgacatccacaccgaatcagcggagttcttttatgccgccagacgccgactggcacaacggcgcgactcgccgaactatggttccgatacgggccgcactggaatatcatggtgtttatagcaacgctgcgagagaggtgggagatcatggaatattgtccgcattgtggtgccccatatgacgagggcagtcggttctgcttccagtgcggcgctccgcggcaatccgccgctggagcgccgggtgctcctgcgataccgaccgctccgatacccgtgtcgggctatggcaacatggcggcgcagccaccggttccatcgcctccgagagcatccgagacggcatccgacgatggttttgccgcattcgcagcgaatgcgggcgatgccggcacacctccgaccgtccccgccggaaactccgccacgccaccggccaatcccaccggatccgccgccgcgcagccgtccgccaagcgcccacgcatgaaactcatcgcggcgatcatcgccgtactggtggttctcgctggaaccgggttcggtctcgccgcgaggaaactggaatggatcggcccgcgcaccgtgccgacggtccgataccgcacggcagccgaagtgtcacgtgagctggagaccaaaggctttctcgtcaagaagaagcagacgttcaacgccctgggcaagggcaagtgcctcggtctggtaggagtcaaggcgggcgaccgtctgcccaagggcacgacggtgacggtcatcgaatcgatgggacccggtgtacccgaaggcacagtcggctctgaaccgagcaaggccgaaaccgcgctactgaaaatgggcgtcaaagtcgtcgagcacgaagtcgtctcggagcaccccggcaaagtcgccgtcaccatgcccgcggacggtgagccggtgcgcgacaccgacgacggcatccatatcggagtcgggatcacaggtgacggcatacccgtcgaaatcgccggaatggacaaggacgaggcgaaaacaaagctccagcaacagggcttcgacgtcacgctcaagccgcgtttctccagccgaaagaatctcggcaagatcgtccgagccgatcccggcatcggcgtgcggaccagcgagaccaacgtgaccctgtattacggcgtggatgccagcaaacgctacgacgtggtcggcacgtccattcccgacaggggatcggacaagatcatgacgaacaccgtggctctggcagggaagtattgcaccgatggcggcaactgcctgacattggaacccggtcagaccgatccaaacccgagtggtctggtgctcgacggcaaaggttcctcggatttcttcgaccagctgaccctctgcacgtattcgcaggacatcagcggctgcaacccgtcctccggcggctactacaacgcaatgaaggacttcctgatccagggcgataccggcgccatggagctgtacgcaggcttcggactgcccgtatgcggcaccacgtcttacgtgggcgacgggccgacatactgtgacggcacatcggagaaacaagtcgaggatggctcggatggaaccgccgaacaggccatgagcgaaaaatatctcaaatacgtggctcgtgatttcttcgtggtgatgccggtcggagccaacctcgaccagctggaatccaacggatatttcgacggctcgactacgtacaagccctatgcggaccgcccgtatctcatccgccgcgacaactccgcatacccggaaatcaaggcgacgaatgacgccttccaccggaagcccaacccgtacgcgcccggcaccaacatgcagccgttcaagaaggcgcccaacgcccacaacgtgtactatctggtcgagcagccggtcgatttcagccagttcaaggaggccactgtatccggcgggcggcagggagacggctccgactcgtcgcctgacgacggcatctcttccgacggcaacggcgatgataccactgaatccgatgactcatcgcaatcccagtcatcgcaatccggtacgagaacctacacgaacgcgcggttctcgtaccgtgtcgacgtgcctgccggttacaagtggcagcaggagtccgacaacggcgacggtcgcaagttcgacgcgacgtccggctccacgcagatcagcgtgtggggcagcaacaacgcgctgtctcactccccgcaggaggagctcgactggctcaaggagaatctcggcggcaacgcgaacatatcgctcgcgcaggtggccggccaatcggtgtacctcagctatgagcagaacggaaccatcacgtatatccgcgaagtcgtcaccggagggaagatcgcggccatcgaaatcacgtatccgaccagcgaacgctcgagcggagacaaactcgcggagacggttccgctgaccttgaagttcgtggggtgatggggctatcgtcaccaaatgcgaggccgtacgaaaccgttgtgttccaagaacgcggcgacgtcacgcagctccggcatgttgatgctgtgcgtcatgccggggtagattttctcggtgagcgtggtgtgcgaggcatagaacgcgctcatcgcgtcgagttcggacttggggaagatgtcgtccgcagagccgtggccgtagaacattggcggcttcagtcgcgcaagctcgccgtcgccaggcaactcgccatgtgcgaggaagccggagaaactgactgcggcgacgtaccgtttcgggttgacgcgcagcatctcgccggcgagtagaccgccttgggagaagcccatgaccacgatggggcgctccggggcgatgctgtcggccacccatgcgtcgatggcctcgccggcttggcgtgattgccaatcgagcgattcgccggtcgggacgccttcgtaatcccatgagccgaaccacgtgtagcccgggccgtacgaaatcggcgcacgcaacgacgcgtaatcggcgccgggcgcacaataatccagcaatcccggcaggtcatgctcgttcgacccccagccgtgcaacagcaagaacaccgggccgcttccattggccggcagactggccaccgcatgttcgatcctcatcgcgctcactcccctcttgtgtgttcgtgttttgcgttcgccaccggcttcagagcggccggcgaatcacgtttcaatgtcatgttccgtcacccatggtagtcgcacgggcgccggcagtcacaccatcgcgcatccgcccccactccatttcatcatctcatcccgccaaagtcccatctcaaggtcgtcacatgggactttcgccggatgaggggtcacgccgcggcacggacatccgctcatagtcccgcgggaaagtcagccaatgggactacgcgcggaatggaagctgcgggattgcatggcgtaccatataactcgacatcgaatccggcgccgcaacaccggcatccaccgacgacacgggagtatcaatgcaacaaccgatcatgacctccgtcgcttttctgtcgcaggcatcggcccctgccgacccgtcgaacgacgaggaccgcgccaccgcgaccgacctgtgtgacacgctgtcggcgcatcgcggcgaatgtgtgggcatggccgcgaacatgataggcgtggcaaagcggatcatcgtgttccaagacaaggagaacaaccgcaacgcaatcatgttcaacccgcgcatcattgctgggagcgacccattcgataccgccgaaggatgtctgtcactggatggcgaacgtccgacaacacgctaccagagcatcaccgtcacctatcaggctcgcagcgggcgcgaatacacgactgccttcgacggattcaccgcgcaaatcatccaacacgaaatcgatcacgtcaacggcatcatcatctgacgaataatgacggtcatcgcgtcatatcgccgaaatcgacaatgtgacgcgtcacaaagcacaccacacactcagcccaactggtccttgatgccggacggcagatgcgtggtgacttcctgctgaatgcggtcaaacgcgctggacagcagcagattacccggaaccgtactgatcaggaatgccagaatcgcggcgatgaccgccgtcaccagacctttgacaagatgggcgacgatcttgaacaccagataggcgacaatcgcgccgacgacgacggtgatcgcggtttgagccagctgcggcagattgccataccacaggacgaactggtcgaatccggaccgcacggtctgtgatgtttgagagatctgcgagttttgagcaatatgcaaggacaacacggcgtgcacgaactgcatgtgcgaggtcagtctcctttgccggtgagtatggtggttgtttgatgatatcagcctgatcaggcctcccgtcatgtgccggcccccgatcgggccgggatgcgggaggtcccctatgccgtcatgacgtcagccgacgaggaagtcgaggacgttcatgccggtgccggtctgcgcgcgatacaactcggtgtatccgcactgacggcaggagatggtgacgaacttcttgttctgcacgttgaacagtttggcgaaatcgccgccggtcgcctggaactggtcgctgtcgtatgaccggcatccgcatttgacgcagatgtactgaacctgctgcataatgaattcctttcatcggaacctaacatcccccgatagtggttcaccctatcagacaggattcgcccgattgccggttatcccatatccgcacgtaacgcgcatacaatcaacaaaaacgtccgcgctccttcgcgatgcgggcgccccatatcggcatcagtgcgcatcggagaagaaatcacgctgaaaaacgccaacagccgacaaatccagaggctatcttcgtttcgaggggttgattcggatgcgtcaaaacatctatctgcgtttcgagggggtggtgctcaagtataaacgctcccaaaaccgcatgattccagcaacatacagcttcgaataccctgcatatcgtgttttggcaaccccttgaaacgcagatagatgttcggagagccccgaatcaaccccccaaagttcatataccgtacaaatcggcgggtcggatgtcctcagtagccgtgcgcgtgcagataatcgtcgtcaaaaccgaaataatggccgagctcatgcagcactgtcttgcgaatctgccggcgcaggtcgtcgcgcgtggcgcagacgcgctcgtgcgggcccttgtatatggtgatgatatcgggcatgacgccactgtatccggtgaagcgccgcgtgattggcacaccttcgtacaggccgagcagctcatcgcactggcgctgcatcgtcgcccgctcacgctcgttcggctcgtcggcgaccgcgataccgacattgtccagcgcgcgtttgaaccggtccggaagactgtcgatggccgtttcgacctcgtgctcgaactcctcgtcgctgatgcgcattccacagccttccttgtcattgaacagtcgccttgcccgccacgatcaggcggatgccccggcacaatcgggagcaggctgactccatgttccaagcataggacggcgtggaccgatgagccacatagaccgtacgccacacgaccggtatacgcttcagccattcgtaacgtacactagtgactgtgcgaaaggaggtgcgcattggcgacgtcggaaatcgaacagttgtggatcagccagtttcaggagaatctgggggcgcttcgcaaagtggcgggatggaccacccagcagttggccaacgagctaggagtcgcacggcagaccatctccaatctggagaccggccgaagtcccatgaccaaattgcagtacctcgccctgcgcaccgtgttcagcgccgaaatcgccgaatgcggcaaccgcgaactggcgaagatcatcaagacccttgttgacgatccgattgaactgcgcatcaaggagcttgggacggccgacaataccaaagcaaacagcgctaccgagcctgacgctcccagcgaagcagacgatgcacggccggtcgcaccggcatccaagccggctgccggcagacgggcacgcaaaaacaaggaacgaccgctgagcacggccatgcaggcacttgccgtcatcaccgcggctctggccagcggcaccgccgccggcgttctcacctatctgctgtttcccaacggcaagcccggcaaaaacagcagacgttgacagagcggaccgcgctgcagaccgcaacaaggccgatcatcgacagtcgtactgattcggcatgacgattcgtgtctatttccgctgccacgaacaatgcctcatctcgatcaacttccggaaaagtccgggattctcttcgcgcatcagcgcggctgcgactgcatcatgtggcggcgcgtttgaacagagaaatataaatctcccggcatatgaaggcaaggctcttcatgcaccgggagatttgacgattcgttacggcagaaaaaacgttacaggcctaggacttcatgcttcttcatgtcgaactcctcttgggagaggatgccgatgtcgacgagttccttgagcttcttcaacgtttccacctgttctgcgacgctcatggaggcggcgtgcgagggcgctgccgcgccggctccgaaggttgccgtatcggcaccgcccgtgctttcggctgcaagtgcggcttgaggctgcggctgctgcggttgcggttgcgcggccatcggcatcggcgctgccggcgccgcggtcatcggattgatggcctgagccatgttcatgccgaggagcatgccgccgccatcaccgaaaccgttgttctggatacctcgggcgatctgctgctgcgcggccatgttgccggccgtctgcgagacgccctcatacgcagagacattcatcttgttcgaagcgaattggcgcacgagctggcgagactcctcatcgaactcgatgctctcgatgccgacgccggacacctcgaatccgaagcgattcctccacgtccccgcattcgcctcatcgttgcgcacgcgtgtggcgatatcgttcgcatgggccggcagctgcgaaattcgatactgatcggacaacgagttgatggcgacgatgaacgactggacgaattcggaaagaatctgttccctagccttgggattgtcgaacgcgtacgacgttacgttggcgggaacgtaattgcgcacgaagcgaaccgggtcggtgactttcagtgacatcgtgccccgcgcccgtatctccaaatccacgccatagaatttgtcattgtagaccagcggcgctggagtgccgaacttaatgccgcggatctcacgcaggttgacgaacgccacatacttcgtctccaccggctgcccgccgaatgtgaatcgactggcgaccgaactgaacagcgatccgatgccgtcaccggcgagcacgcttttctcgccgtcgcggtactcgtaaccgcccggctcggtaatcacgttctcgatgccggattcggagaagatgaaggccgccgtgttttcgggcacataaatgtgggaaccgttgctgatgacgccttcggaaccgtactcgttcgacccgcgtccgttgttcgtgcctcttgggactcccggtgcgaccactacatactcgtcgaaccgaccggcagtgatgatgtctttccatagatccgcgaacgttccgccgagcgcgcccgcgaacgccttgatgattgccatgtgctttctcctcgtcttctcgcgcaagcgcggatgcgccgccatgcgtgttgcctgcatgacggcgcatccgcccagcgcacaggttcggtcggttagttcagctgcgtctcgcgattgcagtattcgcagcgaaccgcctcgcgcttatggccggacagcggcgcgccgcatccctcacaggttcccgacgaccgcgtctcggcgatgccaagcccgttgcgaaacgcgccgaacgtgtccttcaacgtaccggccagcgcctccgtgccgggtatggccttgctgaacgcctgttgcttgttttggatctgatcgagaaaacccattgcttgtccttcttccttatgtggattggcggagtgccgaataccgcgtcactggctgatggacgcaagtttctgcccgcatcgagccatgacctcgttgtagtacgcgaggtcgctggcgctgagcgagccggaatcgatggaaaattacttgaattactcgcagatgtatcagagcttgtgctgatatctgatgtagatgaatcatcaggaccgcgcaggcttatcgacataatgtccttattcgactcatcatgtgaaatccttacggaatagccatccttggtctcacctctaaaccatccgcccctgcgtctgtaatctacagtgaagcccttctcaagaacagcatcattatacgcggcatactgttcatcattggtatcacacacatcaatagagagcttgtcatcatcttcaatgaaattgacaccagtcgtagatttcggggttggaagtttggcgccaatattggtttttggccaagagaaagctttgcactcaatttccggcgcggcggccggagcggccttttcgagagctccggagacaacaatgcctacactgccaatgacaaaacccaacactgtaagtactgcggcaatccaagcaaacagctgaccagtcaccttgccgccgggacgtgttacatacaacgcagcaaatgtcagcaacaaggatatgaacgccatggagaacaacattccccattccaatgacgccggcgcgaacgtgctcagcaccatcaggatgctgtatacaagtgctgcaatggcgagtttagagcggttaccggaagcgccggtgaaccgaggattattcaaaatcttccaggccttgttctccttcttcggggcattcgccgcatcggcgggtgccgctgtgggcagagcaagtgccggatcaagaacagacaggaattcagcggtccgagtgccaccatcatcaccggtcacgtccagtttgatggccgtcccgtcagcaccctgagcgctggccttcagcgtgaattgtgctccgtcatatgcgtggaatgtcaccgttccctcagcgacgttctcttcatccacggtgaacgtggcgctggtggacagctggtcgtggacggcctgcattacctgctgcagactggtcgcatacacacgatcgttgtacgacggagtctgggcgggaacatcttgaactggcggcattgtctgcgtcggcggcacagactgttcggtcggaggaatgaattgggtgggcgcatcattactgcccgaagtcgttggctgattgccgccggcggggaagggtgccggctgttgactatcgtttgtcatgattttcttcttcctctttctttgccagcgacatcgccagcgcgcaaacggcgagacatgtgagcatgaccgccagtccgacctcgatggcaaaccggctgcgttcgttcattgtcacatccttctctcgtcagccacttgatgtcgctgtactcctcgattagtgtatgtcactgtgaatatgtacgcaaattagcattatgtaataagtttagctagtcaaactgagttgaatccaccctttccgccacgtgcccttacggcagtggcaacgtcaattttcaggatggcgacatggccccgcatcagttgccaactgattttttctccggcgtttcgccgggcgagtctcgctacgctgaatcatcagaatcacacgacatagcaagaggagcgcaacatggcagacacccccgaagagcatctgaccgaagagctgcttgaccggctgcttcacagtgccaagatcgaaacgtatctcgacgaggagcacatcacagatcgtgcgttgcccgattatctgaatgaactgctcgacagaagcggaatcaagcgcaaccctctcgcagaaaaaacaggcatgaatcagacgttcatctacgatattttcgccggcaaatcccggccgggaaggaacaacgccatcagactcgcgttcgggcttgggtgcgacctgcgcgagacccagcggctgctgcggcttgccggcgtgagcgagctctactgcaagcagcggcgcgacgcaatcatcatctggtgcattcagaacggccgggaccttcccgctaccgacgatgaactgtatcggatgggcgaggataccttggtgccgaaggactagtgcggggaggtagctggcgacgcccccacccgcttcgcgggagcccccgccagcgggggcgagattcttagcacatcactcgtgcgcttgtctccgccagcgggggcggaatcttaggccatggagcatgtcgatcgggaacgggttaggatagcgggtaacgaccaggactggggagcaagatggacgataagcagaccgcgcacgcgatggggatcgacgacacctaccgcgtcgagcgcacgctcgctcgcggtcagggcggcgtcaccgaactggtcaacatcgacggcatcggtccgttcgtgcgcaagaagatcccatcccagctggcccaacgcaacgtatgggcggctctcagcgcctgcacgaacccacgcctgccacacgtcgaggcaacatacgagttgcccgatcatttcgtggtggtgtatgactacgtatcggggcggcctctggagcacgtcgttcagcaacaggaaaaacttcctgagcgcacggcgacacaactgatctgccaactgtgcgatgccgtgaccgagctgcaccggcatggcatcatccatcgggacatcaccccatccaacgtgattgtcgccgacgacggagcgcatctggtcgacttcggcatcgccaggaccgtcgcagcgaatgcgacgcacgacaccaaggcattgggcacctacggcttcgcttccccagagcagttcgggttcacacagaccgacgcccgatcggacgtgtactcgctgggacggctgcttggatacatgctgaccggcgtctaccctgacgacaagcgatacggccagctgctcgccgacccccatgtggtgccatcccagctgaagtcggtcatcgaccgggcgtgctcattcgaaccgagcgcccgtattcaaagcgccgacgaactgcgccgcgcgatactgggacagcctgcacagcaaaatgagaacatcgccaggcccgccatcgtgaacgtcgcgccgcaatcggcccggaagcgctccaagcgcaaggcgattatcatcggtgccatctctgcgattctgatcgccacgctcatagccggcatgctggttctcggtaatgtgttcaaaaccggcaaacagtccacgccgaacagcagcactacgtcatcatctcacagcaatacgtcagacgcacaacagccgggcaaggatggcacgaacgacagcaatcagttcaacggctccgcgaacgggcagacaacggatggaaacagcactgacaatacgcagagcgatacaacggagaacccgctgaaaatcacggaatcagggtggtcggcggacagtgccggctatatccattatgccgtcgcggtaaagaacaccagcagcaccttgcaggtcgagtttcctgcgattagcatcaccgggcgcgcgaaagacggctcgatactgttcgctgaggataacctcagggcagtatcgttcccgaagcagaccatatatcttgtcggacaagctggcaatggccccggaagcgaaactccggaaagtgtggaattctccataaaccaacgtggcggcaccgatatccggcaatcgcatggtgtcgtcaccttcacaacgtcaaatctctcggtgtcgcatgatagttttagcaataccttattcaatggagagatcaaagccaaaaacaccggctacgattccattctaaatggggcgtatgtgacagtcgtgctacgcaacaagaaaggcgacatcatctacggggatggccagcctatcgattcgatttttgacggaaaaacgcattccttctcaatccctatagacgattgtcccgattatgcctcgtatgagattcatgcgtcaatttgatttttgatttgccggaaattcgacgccgcccattgcgtatcacggtcatctcaccactatgccgcttgccgctccggcgatgtaatcggagcggcaagcggctacgcaacaatacaggtggcccgaattatcctcagccgcggttgtcgaacatcgacaggagcatcttgctgggttcgacggcgtagacggtgtgcggcaggcgggcgctcaggtagacgacgccgccgggtacgagttcgacctcgcggccttcgccgccgacgcgcagtttgccctcaagcacctgaatggtcaccggcatggcggccgtatgctcgctcagcgcctgatccttgtcgaaaccgaacagcacgacacgcaggccgtcctcacgcatcaccacacgcgagacggtggattccggctggatctcgatcagcgatgcaagatcggccacatagcccaggtgtggttccgtggaaatggcgtggccttcggcatcgtgcttgcacgcgcagtgcttgggctgctcatcaccggcttcctcagcatcaccgtgcttgcacttgcaatggtgcgcttcgccttcgccggcttccgcggcgccgtcgtgcttgcacgcgcaatggtgggcggccggctgctgagcggccgaagcgttctctgcggctgcctcggccgcggccctgcgctgacggcacttgcagtgctgctcgtcacgtcccgcctcacatgcggactgctgttcgttctcatctgccatgatgttctccttcgttacgttgccgtatctttttgttgcgcgttcgcgccgcatattgctgcgcggacgcgcatccacgtatatcagtgcatatcaatgtcggacgccgtaccgggcatcgaaccgcggctgatcttccgacaccatccaccatcattatctgccagcacggccgccggcggaatcatccgcccggctgtcggccggcgcatcgtcacttcgcgggcttgcgcaccacgaacgcaatgccgttgagctccttgctgtacttgtggaacgtggatttcatgttcatcacgcgggcgcggatgtccttgtttcccaacatattacgcaggatgcgcagcacgccgccaagcccctcatcggcgagattgcggcgcatatccagcagcgccatcggctccttgccgctccacagcacttcaaagccctcggattccagcagctcgcgccactctttctcggtgagaggacgggcgttgaccttgatgctgcgggcgagtgccttgcgcacctcgtccttgaccggctcaggcagatcgtccggctgcagcccaagctcgtgaatcgaataggtgccgccagcgcgcagcagacggtaggcttctgcgatgatggcccgcttgccgcgctcagtctgcatggtaagcatcgcctcaccgatcacggcgtcggcgctttcggattccaaccccgtgtccgctgcgtcgtgcagagcgcagctcgtcggaatggacggtgcattctcggccgtcagcttggtgatgatgtccaccacctgcgggtcgcggtcgacgccgcgatagcttttcggcttgcgctcaagaatgagctgcgtggtacggccaaggccgggcgcgaattcgacgacgtccttgccttccaactcggttttcgccagcatgcgcccggtcagcttcttgccgccagggcgcagaacgcgcttaccgatgcgggcgagcagccagtgtccctgcagatgctccacatcacgatctgactgaggcagcggaaggctgccgttcccctgcgcattggtcgtggattgtggcgctgtattcgtagtctgagttcccatatcacgcgacactatcggcgatgcgccccatgcacaagggttttcggtctttcatcagcgtaatgtgattgaactcacttcgaccggcggaatcggccgagcagcatttccgacatgccgacggctacgtcttgtgtgaagaaccggtcatacaggcactcgtcagtgagccatcctgttgacaatatgccacaatgaaaccagtgcgacgatgcgcggcagatcattcaccagtcacgtcatccgcgcaccgcacgacaacaatcggagacaatcgaggacaggaagaatgagagttatcagcaatattctgtggattatcctaggcggtctgatcatcgccatcggctgggcgctgatcgggctcgtgctgtgcgtgacgatcatcggcattccgctgggcctccaggcattcaagatggcggggctcactctgacgccgttcggcaaaaccgtccgctacggtggcggtgtcggctcgacgctggccaacatcatctgggtcgtgctcgtcggcttttggatggcgctcagttacgtgggcgccggcctgctgaactgcatcacgatcatcggcatcccgttcggcatccagtcgttcaagatggcgaaactggcgctctggccgttcggcgcggacatcgtcagcctgtgagcgtccggctcgcaggcctcatacggcggtctgcctataccgttccttcctcaagataaaaaacggtcgagccaccgtcatcccattcgaccttctcctcgcgcctgtgcgtcaggccgcgacgcgtataaaaaccgacattgcagccggtgtcggtaaacaaatagtaccgccggacgccaacgcggcggaaccgttccagcagatcatcgaacaggaagccgcccactcccccgccacggattcgctcgtcgaccaggaagagcgtcacctcggcgtcgtatcggttctttgcccctcgtatcagccgtctgtcgacacggttgatacgcagcatttcagcaatgccggagcgacctgcggtcgaaaacagcaacgggaacaatgccctgatgatatgacgatggtgccggttcggcaggaggcacaatcgtttcggaacattgatgtcgacccgcgccaatatcacgcccaccggccggccgtgcagcaccgcgacggtcgcctcggaagagcgcgccagacatgaatggaagtccgcctccgccagccgacgggaacaatcgctgtccgctttttggccgcctgaccattcgctgtaccatgtacgccgcagaatctcgatcagcgcaggataatcgtcgcgccgcagggtgcgcagacgcactgcggggcgacgcggggtcgctgctgtcgatgacgatgctgtcgaaaccgcggcgaccgaggtcacatccgcaatcgtgctcgaggaatcgttcataccgcaatggtgacgtggcaccgagacgttgacggagcaaagtgagacacggcgaggcgggacggacggaaacgcagcacaacgactctcctgccgagacacgcctggatgtgtcacaaagccgtcagagccaatcgccaagaatgacggaacagagccccgttctttcaaaagtcacacgacaagcttgcgactacgcctccgtaaaggtcatcgatgccctaatccgaagcagcggatacggaaacagagaaatcgaccgtctctgcgatggaacgatcacatacggacgcatccgagacattcgcaatggccttaaggctccggtgcgtttgtctgagtttctgcaggcgcggtgatctcgacttcgcggcgcatgaggatgagcataagtacgatggcgatgaagacgatccggcgtaaagccggatgtggtgccgtgcggggcttcgtccttcgtgtctaatcgcgattaaattgatattaattatgcaatcggctacttttatttgacttatttctcgtcttatcttatatttcctacaactaagagcctaatccggaaagagaggcggaacaacgggtatgaaatataggagtttggcgcggtcgttccatgccgacaggtccaatgacgccttcaacaaccatgcgaagcttgcccggcaacggctcgaggcggactccacattcaggaccggggtcgtcacccctctgggcgaactgttcgccgccacaccacgcgagacatccatgctcacggaaaagatacttctcgcggaacggcgggtatcccggctctggaaccaaatccctggcgtcatgcgctgggactacatacggcactccatcagcgaggaattgttcgccaccaacgagatggaaggcgtacgcagcacccgcaaggaaacccaggaagccgtggaagcggccgacaaggcgaggaaggacggcgacgaccccaaggctcggttcagcgaattcgccaagctgtacctgaacctcaccgacaaggactccgcactgccggcgggaatcgccgacatccgcgacatctacgacaaggtcgtgctcgacgaaatcaacgagagcgacaagccggacggcgaactgttccggaaaggcgacgtggaaatacaaggcccgcacggcctcgcgatccacaacggagtcaaaggcgaaggcaacatcggcgcactcctcaccgacatgatccatctcgcgacctccgacgagattccccggctgcagtcggccatcatgtcgcacttcctgttcgaatacgtccacccgttctacgacggcaacggcagaaccggccggtatctcctggccctgtacctgaaccacgacctaaccatgcccaccgtgctgtcgttgtcccgcaccatcgcggagaacaagaacgcctactacaaggcattcatggaggcggaggacaagctgaactgtggcgaactcacgctcttcgtgaacaccatcctcggattcatccggaaggcccaggacgagctgatcgacgaactcgaagttagagtcgaccagctcgacaagggccgggcggtctgcgaccagctcgaacggaagcacggtctgtccgcgaaggcggtctcgatactatatggcgtgatccaggaggagatgttcgactcgaccaagtccatgacgctgaacgatgccgcataccatatcagattatccaagcaaagcgcgagaaagtacgtgggagagctcatggacgcgggcctcgccatccagtccgggaagcgcccactgaaaatacgggcatcggaatcgttgaagggcatccttgaggccggaatgggcgaggacgccggagagcatggcggcaaaacccaacaagaagaaacagaaaccgcccacgagggcgatcccgcataactcaactattcggaaattccggatagttgagttttcattaaccatcgcggccggatggatggtcaaggtttatccgctgcgtgaaacgtcgagtgagacgtgtttctcgcggcggaactcccacgtcccgtccgcgcgatggacgatgctgccagatcccttcgtacgtcatctgccattggccgccatgatgttcctccctgtcgggagcgccttcgggcatctgccgcaagcgccctcccaagggcactctattggcactctatccgggccacaaacggccagatacgtggcaaaaacggccattccccggtaatcgaaaaacggcggaatccgcacgtgtccggagaccggaaacgttgggattccgccgtttttcagggctgcaaccccctacttgctcacattgaacttgaactcgacgatgtcgccgtcctgcatgacgtagtcgcgtccctcctgacggagcttgccttcctccttgatcttgaccatggagccttcggcggccacgaagtcgtcgtaggagacgatgtcggccttgatgaagcccctttcaaaatcggtgtggatgacgccggccgcctgcggggcggtccagcccttgtggatttgccaggcgcgcacctccttgactccagcggtcaggaaggtctgcaggccgaggatgtcgaagccgacgcgggcgagctggtcgagaccggattcggacagcccggcgtcctccagcatctcgcgggcgtccgcctcgtcgaggtcggtcaggtcggattcgaactgggcgttgaggaacacggccggcgccggcgccacggatgcggcgagcttggcctgcaactccttgttggcgagctcgttatcgtccacgttgaacacgtagatgaacggcttggcggtcatcaggtgcaggtcgtagatgtcgtccttgttgatcttgcctgcggcggcggcatggtcgatggtctcgccggcttcaaggatctccttggccttcttgaccgcgtccatgtacgcctgctcaatcttcttgccgcgcaggtccttttcgagcttcggcagcgcgttctcgatggtctgcatgtcggcgaggatcagctcggtgttgatcgtgtcgatgtcgtcggccggatccaccttgccgttgacatgcacgatgtcgtcgtcctcgaacgcgcgcacgacctcgcagatcgcgtcggcctcgcggatgttggccaggaacttgttgcccaggccttcgccttcggaggcgcccttgacgatgccggcgatgtcgacgaaggtgacggtcgcgggcacgatcttctcggtgtgcaccagctcggcgagcacgggaaggcgcttgtccggcagcggaacgatgccggtgttcggctcgatggtggcgaacgggtagttttcggcgaggacattattgcgcgtcagcgcgttgaacatggtggacttgccgacattcggcaggccaacgattccgatagttagagacatagtatccagtattggtgtcaaggtggacgttggccgcgccgatgacgcaattcgttgcagcgaatcgttctcaataacaaaagtgcgaatctcacgctcggcaaaacgaacatgaacaccgtatattgcccggaatataagggttctggacaatgtgcggttgagtggttttgttcgttttcctcacacgtttcttattgagaacgattcgctgcgattggcagacagcaaaatcgtcacagctcggccgcgccgatgcgccgcactgcctcgcgcagcagcgattcgtccttcagcaggctgagccgcacccaatccttgccgacgcggccgaagcacgtgcccggcagcccggccacctgcgccacgtcaagcaacgcgtcggcgaaacgttgcccgctccacccctcaggcgccttgaaccacacgtagataccgccggcggagtcgaacacgtcgaatccgagcgagcgcagtcccccggcgacgatctcgcgccgcccggcataccgccgggccagttcgtcgacgcacgactggtcgctgttcagtgccacggcgccggcatcctggatcatgccggtgaccatcgaacccatctgataatggtattgcttgagccgtgcgaccacgtcccggtttccggcgacgaacccggccctccacccggccatcgcgtacatcttcgacagtgaatccacttcaacggacacgtcggacgcgcccggcaccgtcagcaggctgacctgctggtcgctcacgccgagtcccgtgtatgcgaagtcatgcacgatgaggaagccgtaccgcttggcgagctccaccgcgtgctcgaagaatgacgccggcgcctgcgcgcccgtggggttgttcggatagttgagtatcagcatgcgcagccggcgccacaccgattcgtccaccgcgtccaggtcgggtagccagccgagttcggcgcgggcgggcagcagtatctcctccgccccgtgcatgacggacatgcaatggtacgacggatagtaggggtcggcgaacgcgacggcgtcaccgcggtcgatcagaatcgcgaacagtccggcgagcccgtcgaccgcgccttccacggcgaacagctgggaacgccagtccagttcgacaccatgcacgttgcggtaccagttcgcggcggcctgcaggaacgccggcttaccatcgaacggcgtgtatcgcgcgttgagcgggtcgtcgaccgacgatttggcgacgtcgcggatgaattcggccgggtatgcgtcggggttgcccttcgccagatcgatcacgtcggcgccggatgccacggctgcggcgaccttcacgtccatgtcggcgaacacgttcggcgggatgatctgggcgaccggcgcgaaccggggcgcccatacgccatcgcgggtgtcgtcgtcttgtgcggcgctcattgcggtattgctcctttgggatgggggttatataggaacgggaaaagaggggacatgtggcaaggaccgccctccggcgttacgcgccatctcccgccagcgggaggtggcatgccgtcgccccgctggcgaaggactgtcggcgtagccgacttcgggcggtccgaggaggaagcgaatctcagtgctgcagccgcttggcgagcaggttgcatatcagctggctgacgaacacgatgacgagaatgatcagtgtagccaccagcgtcacgtcgctctggaaccggttgtagccgcggatgatcgcgaggttacccaaaccacctccaccgaccacgccagccatggcggagaaggcgaccacgttgatgaacgacagcgccgacacgcggatgatcggcacgcgcccttcgcgcaggtacacgcgccatatgatgtcgagcgtacccaggccggatgccttggccgcttcgaccaggccaggatctatctccagcagcgcgttctcgacctgccgggcgtagaacggcacggtcgcgcccacgatcggcacgatcatcgcctcggtgccgatggaggtgccgacgatcactcgcgtcacgccgaccagcagggccatgaggatgatgaacgggatggatcgcacgatgttgacgatcttgtcgaggatgttgtagacgatcacgttctgcgtgagcccgccgcgtctggtaagcaacagcagcagaccgagcacaaggccgatcgcgtatccgatcaccgcgccgacgatcaccatgtacagggtctcgtaggtcgcgtcccagacctccggccagatcatcgacacattcggcagccatgtctccagcagatcattcattgtcgttctcctccacctcgttcacatgcaggtcggcgagcggcgtcgcgctcaccccgaccgtcgggaaatacgcgagcgccttgctgaccgcctcggccggaccatccagactgaccaggatcatgccgaccggcgtgccgtgaatcacgtccacgttgccgaacatgatgttgcctctcacgccgaaccgttcgcgtatgtcggccatcagcgtctcctccgcaccggagccgaccgagaacagcagatacacgctgccgctctcccgctccttgctgaacagcgggtgctcctggacgagcgtgatgcccttgttcatgttgccggacgtgtagatgaactcgcgggtcagttcgttggacgggtggtcgaacacgtcgaggatggacccgtcgtcgacgaccttgccgtggctcatgaccgccaggtcggtgcagatgtccttgacgacctgcatctggtgggtgatgagcacgatggtcaggccgagccgtgcattgaggtccttgagcagggcgaggatcgaccgggtggtgcgcgggtcgagcgcgctggtcgcctcgtcgcacagcagcacctccgggtcgccgatcagcgcacgcgcgatggcgacgcgctgctgctggccaccggaaagctgccgcggatacgccttggccttgtcggcgataccgacgagttccagcagatgcatggccttcgcgcgggcgtccttgcgggataccttctcgtggatgagcggcagggtgacattgtcaagcacggttctggatggcatcaggttgaagtgctggaagatcatcgcaatcttgcggcgcagcggtagcagccggccctcgccgagcgtgctgatggtggttccgctgaaagtcacggtgccgctggtcggacgctgcaggacgttcatcgtgcgcaccagcgtcgattttccggcgccggagaaaccgatgatgccgtatatggagcccttgttgatggtcagggacacgtcgtcgacggcgcggaagcggtttttgccgcggccgaattcgacggtgacgtggtcaagcgagatcagaggggcgccggcggcgacggaatccgaagcctccgctgctgcggctgcggttgcgttgacggttgcatcgctcacgcggcctcacccgcccgacccgcagcaccatccgccccatcgacggcggacttgccggccgccgcgagcacggcgtcgaggatctccttctcgccggacagcacgaagtcctccatcaccgggctgaacggcagcggcgtgaaccgcgcgccgacgcgcagcaccggcccgcgcagataatcgaaatggttctcggccacgcgcgccgcgatctcgccgcccacgccgccgatcttgatggcctcgtgcgcgatgaccagatgaccggtcttcttcaccgacgcgtagatggtcggcatgtcgagcggcgtgatggaccgcaggtcgatgacctccacgctcacgccgtattcgcgccgtgcaacatccgcggcagtgagcgccttggtgagcatcagaccgtaggagaccagcgtcacgtcggcgccttcgcgcacgacctgcgcacggctcaggtcgatgggcggcaggtcctcgggcacgtcgcccttgaccgggaacagtcccttgttctcgaagtagatgaccgggttaggatccttgatggccgccttgagcagctgcttgccgttggccggcgtcgagggcacgaccacgcggatgccggggatgttggtgaaccacgtctccagcgactgggaatgctgggcggcgccgtgcttcatcaggccgtcgggcgcgcgcagcaccagcgacatggtggcctgtccgccgaacatgtagtgcgccttggccatctggttgagcacctcgtccatggcgatgccgatgaaatccgcgaaatgcaggtcgatgaccggcttggcgccggcgatggccgcgccgacgcccgcgccgacgagcgccgtctcggagatcggcgtgtcaagcacgcgctcggggaattcgtccttcatgccggcgaactggccgaagatgccgccctgcttggcgatgtcctcgccgtagacgaacacacgttcgtcggctcgcatctcttcgagcatggcctcgcgagtcgcctcgccgaatgtgatgattcgctcactcatacaggttcacctcatcgctgaatacgtcgtccaaggcgtcctcggccttggggaatggactgtttaccgcaaattccagagcctgtgcgaactcctggtcgagccgctcctccgcggcgtcgaggtcgtcctgcgcgacgacgccttcgagcaggatcttgcgccggaaccggtcaatcgggtcgttgtagagtttccactcctcgacctcctcctgggaacggtacttctgcgggtcggtgatgaagtggccgtcgcgccggtaggtcttgcattccaggatggaggggccgtcgccgcggcgggcgcggtcgatgagcttggcggaggcgtctcgcacggattcgacgtcgttgccgtcgacggtgacaccggggatgccgtatccctgagcgcgttccgacaggtagtccacgttcttgatgtcgtcgaagcgggtggtggatgcccacgcgttgttctcgcacacgtagatgaccggcagtttccagctggcggcgaggttcacggcctcgtggaaggtgcctcggctagatgcgccgtcgccgaagaagcacacggccacgtcgctgccgtgccgctgcttgatggcgagcgccgcgccggtggcgatgttgaagccgccgccgaccacgccgttcgcgcccagcatgccgacgctgaagtctgcgagatgcatggagccgcctttgcccttgcagtatccggtggtgcggccgtagagctcggcgagcgaacggtcgacgcgggcgcctttggcgagggtgtggccgtggccgcggtgggtgctggtcacgtaatcgtggtgggtgaggttgctgcatacgccggtggcgacggcctcctcgccgatgtacaggtgggcgggtccgacgatctccttgccgatgtgcgccttgacggtttcctcgaaccggcggatcttgcgcatggtggtgtagaggtcaacggcctgctgcgtggtcaatggtgtgctcatgatgtgcgggctttcgtatgttccttggtttgtttcctgttggatgtgggcggcgcgtgggcccgtcccgacttgtgccgggccttgcgcgggaatcgtcgcggcatggccgtctcctgcatgatccgtctgacgacctgtgcggccgtccttcacggatgccatgccgggccatatggccgacctgccatgatgccggccggagggccgccgcggcgcggaccgtccccttggtccgcgccatcccgtccggctggcatcatgtcttctcggcgagcactccccttcagccgagatgcgtcgacgttccccgttcgcgtcgcttgtcgtgtgtgttgttatgttgcgtgctgcggttgcggcggcattcgccgcatgtcaccacagcggaatgacggcccccttgtacagcttgtcgatcagtttcttgacgtcgtcgctgcggtaggcgtccacgatcttcttgtaggtggcgttgtccttatccttggcgcgggagacgatgatgttgtagtacggcttggactgctcgttgaccggctcgatgtagatggcgtccgacttggggttgagtcccgcgtcgagggccatgaacacgttgatgacgctggctccgacgtcaggcagcgaacgggcggtctgcgaggcttccagctcggtgatcttcaggttcttcgggttggacacgatgtcgtccggcgtggggttcgcaccttccttgtagtcgagcttgatcaggccggcggactggagcatcagcaggccgcgggccgcgttgacggagtcgttggcgatggtgacttcggagccttccggaatgtcttcgaccttcttggccttgtcggagtacaggctgatcgggttgagcaccgtctcgccgactgcggcgagcgcgttgtcgtgcgtcttgttgaagtcgtccatgaggatgtagccctgataggcgttgaggtcgatgtctcccttggcgagcgcctcgttcggctggatgtagtcggagaacttcaccagttcgacgttgatgccctccttcttcaggttcgggatgacgacctgatcccagacctcgttgctgtcgccgaccacgccgaccttgacggtggtgccggagtctgccgagctgctgttcccgcacgccgtcagaccgccggcaagcgatgtgaccgccaataccgccgcagcgattctcctgatcttcatgtctcttcgttccccctggtatcgtgtttggtttgtgccgtgtgtttggatgctaagattgctgatcgtgcacattgatcttgtgcgcccgctgcgttccggcgggatgccggccgttttcgcgaacaatgctcagcgtaatgcgcgttttcacgcggttcttgcgattgcgtcgaacagggctatcgccgaaatctatatgccgctatcatgcgcgtatgccgcacggccggcgaatgcgcgcccgggcggcgcgtaggccaccaccagtctcacatattgagacataaagccgtcatctcgtcggattcgccggcaaaatccgcgccgtaaccgaatcgcctcgaatggatcagtcccggagacggtggcataatacacgcggaaaacatcagtcacggcgaaaccgtgcaagggagggaacatgatcatcaccaccgtatccggcgcatcaacggcgtccggcagtcctgtcaacggcattctgctggcgatccacgcgggagccggcgaccggagcaaggatggcagagcgcagaagactgcgcaggccgagcgcgatctgcgtcgggcgctggacgccggctacgcgctgctcgaacagggcgcgcccgccgaggatgcggtatgcgccgcgattcatgtgatggaggatgcgccggagttcaacgccggtcggggcgcggcgctgaccagcgagggaaaagtgtcgatggacgcctgcctgatgaccggcgacggcgaggtcggctccgccgccggactgaccacggcccggcatccgatcgatgtggcccgggcggtcaaggagcgcgccaagcacacgatgttcgcgctgccgggcgaggacctgctgcgctcgtggggcatcgaattgcgcgatccgtcgtatttcgtgaccgaggaacgccggcgttcgctggcacgcgcccaatccgagggcgacgcctgggagaagcacggcacgatcggcgcggtggcgagggatgccgccggacatgtggcggcggggacgtccacgggcggcatcacgaaccagatgccggggcgcgtcggggattcgccgctgcccggatgcggcacgtacgcggccgatgacagcgtcgccgtgtcatgcacgggtatcggcgaggcgttcgtgaggtctgtcgcggcgcatcaaatcgcggatcgtgtgcggttcgccggccagtcagtgcaggaggccgctcaggccgcactggatgacgtggcggcccggcgcggcgacggcggcgtcatcgtcatgccggccagcggcgacggcgtcatcgcctacaacagcgagacgatgaactacggatacgtcaccgccgacggcgtccgcgtcgttcacggcgccgaataacaacagacggcctgcgccatccgacaacagctttccgtccatcccgcgaaagtcccatctgcggcgtgcgatatggaactttcgcggaatagggcaccggacgatatcgagctacaccgcggatgacgaccgtccgatggacccttttgcgggatcagcctacgatggcgtcgacggcgtcgatgacggctccgcggaagccgtccttctccagcttggcgacgccgcggatcgtggtgccgccgggcgagcagacggcatccttcatcgctccgggatgggtcccggtggccatgtacagcgctcccacgccctcgaccatcttcgcggcgagccggtatgcggtggcccgctgcagtccgtactgcacgccggcgtcacccagcgcctcaatgtacatgtcggtgaaggcgggtgcgcagccggccaccaccatggcgatggtcatgtgtgcggtgtcgacgcgctcgatcagcgaaatcgggccgaacagcgattcgaagacctccgtctgcatgtcggtgagcgtgttgtcggtctcggtgacgagcacgcccttgccgacggccatcggcgtgttcggaatcgtgcactggatatggatgctctgagccagatcgccgaacagcttctggtacttcgccagatcccagccggcggcgatcgacaccacgaaccgtccgttcttggcgaactcgtctgcgatgggcttgatgacggattcgatctgatacggcttgatggcgatgatcaccacgtcggccgcggcggcgacctcacgcgcgttgtgcagtggacgcgccccgagcttcgcagtactggcttccagcttgtcgtaatgcgccgcgcaggcgacgatgtcgccgccgttgacgacgcccgcgtcgacgagaccctgcgcgatggcctgcgccatgttgccatagccgatgaatcctatggtgatgttctgtgccatgatgctccttgttgtgttgttcatacgaaagatgcagttcgtcatgccccgccgcgcacggccgcgaagcgtacgcccgcacgctagaacagcgattccaggtcaccgcggttgagggcctcgtcgtagagatggcggaacacgagatcgccgtgcagcccgtcatgctcgaactcgttggtgacccagtaatgcgagttgccgacacggctcagcgtgtcgagctgcatgccggaatccacgtacatgtcgtcgaaatacacggccgattgcagcggaacctcgttgcgggccagctggtcggcgtcatagatcacaccgaatctcgtatcctccatcagcaggtccatcgccggcttgaacggccgcagcgcggactcctgctcgaacatccacgggaacatcgcctcgccggtgaaggccagcgggcgttcgccggtcgagaaccggggcatggtgtcgcgcacgcgctgtgccgcccagcgaatcggctcgtccagttcaccgttcgcgtagatgaactcctgcagcggccagtacaggggacgcgaggaggtcgcgttcatgaccttcgccaagaactcgtcggacaacgccgccccggctgagaccgaaccgtcgccgtcgacgaacgcatcgtcgaaaatccagtgcacgcgctcgaagcttggcttcatgccgaagtcggagccgaggcattgcaggcgctccacggtcagcgggtcgccgttcggcagcagcggggttccctcgggcagcgagccggaatcgccaccgatgccgccggcttccgcgatctcagccacggtcggcagctgatccgcgacggcggcgacacgatcggcatcgacgccgtagcgctcgtaaaactgcgcggtcttgcgggccatgcgcgggaacgtgtgctcatagacctcggtcgcgttcgccgggacatgcgggatgccgccgcaggtgaagctcgcggccactccttcggggaacagcgacaggtaggtcagcgtcaggaatccgccatagctctggccaagcgtcacccacggagagccgccgaactcggtgcggcgcagatgttcgaagtcccgcacgatcgaatccgcgaggaaccgcttgaggtaatccgcttgcgcacgcgctcccccggcggcgagcctcgccatggcatgcgagtcgacgcgcgacgagcggcccgtgccgcgctgatccggcagcaccacacggaaatgcttgaccgcctccgcaatccatccgtcgctcgacgggttcagcagcctgggtccggcccctcccggaccaccctgcaggaacaccagcagaggcagatcgtcatgcacgtgctcgggggcggtcaccacgcggtagaacaggctgatcgattccccgtcaaagccgcgccccggctcatgaccggcccaatcaagcggcatcgtggccgaccgatcctcgatatgcagccccggcacgtaatattcggcaagcagcgtcatacattccctttcattgatgcaccccggcatcccacgatgccgtaccattctcggtaccactgtagccgaccggcggcggaaacccgatgggattcccaccaacgaaacgcaccccgcccgacacgccgcatcgcaatgaatcatccggccgaccgatgtgggtcgggtcaccgcacgcgatacgctgaaccgtatgggaatcatggaacgaatcaccacgtggaacaggaagcatgtgctgctcgcagatgccctgtatgcggtgatcatctccatctttttcacgctcatggccggtaccaatgacagcaatcccggcatcatcgcctatttcgaccatacggtaatggccttctggagcttcgttctgatggttcccgtcgcgatgcgccggtggaagccgcagatggctacattgctgttcgccggtctggtggtcgtccaactggcgttcgggccgtcgatggtatatgccgacctgatggcgccatggatgctgtattcagccatcgtatatgcggatccgcgcaattcgaaggcgttcatcgtactcgccgtcgccatcggggccttggcgtcgcccgtcatcatctggtccgccgatgcgggtcccatcctcaatcagggcgtgccattcgatggactcagccccctggagacatgttcggggacatacatctatggtctgagcggtgattgcgccaccaccatagcgacaagctcagtggccatattcatcttcatcgccgtgtatctgttcgcggcgatcatcgtcgcgtactggcagcgggcccggcgcatcaccgtcagcatgatgcatgagcgcaacgacgccttgcaggcaaaagaggatgaggaacgccatatcgcggcgctcgccgaacgcgcccgcatcgcgcgtgacatgcatgacgtggtggcgcacacgctgtcgatcatcatcatccaatccgatgggggccggtacgcgggcgccaacaatccggcgctggcccggcagaccatggagacgatccgtcatgaatcggagcgcgcgctgcacgacataaaacgtctgctgggcgtgttcggagggtcggaccatgccgattacgcggatgtggacgcgctgatcgaccaggcgagggcggcggccggcatggggtgcacgattcgcaagaccgtgtccggccagccgcgggccgccgcgctcggcgcacaggcgagcaccgcaatgtaccgcatggtgcaggaggcgctgacgaacgtgcgcaaatacggcggcccgaacgtcaccgtgcagatcagcgagatctggggggctgacggacttcacgtcaccgttgccgacaatggccgcggcgcgtcatcgtcgttggacggccacaagcccggttacggactgatcggcatgcgcgagcgaatcggcgcggtcggcggcagcgtgaccagtggcccgcagcttggcggcggcttcgtggtgtccggcttcgtgccgtacagcactgtctcaacgcagtccgaggatgctgcgccggcgtccgaaagcccgaacgcggcgtcttccgctgcggtgtcttcgggcgcggcaatcatgccgatggcggccccgacgaccggaacggtttcaatggcgacggataccgggaatgccggggtcgtcagtaatgtcgcgaacgccccgcaatccgccgtcgccagtcaagtcggtgtcgtccaaccggccggtgtcacgcaaccggccggcgcaaagatgccccgtccggtgtcgcagatgtcatcggtcccgacacaagcgccgccggcgcccatcaccatacgcctgcgcacgattctgtccgccctgcgttcgaagccgatccagcaggcatccgctaccggggagcagcggctcaactggatcgagcgcatgtcgcagtggaccgagcggcattatctgctgaccgacctgctgctcaccatactggtggcctggatgctgctttccatcaatccatccgtcatatacgccgagggactgcagctcgacaaccgtttcgaccgcgcattgacgatcatcatcctgattccgttgatcttccgccgcaggttcccggaatccagcgcgctggcggtggccatcctcgccgcgcttcagctgctgttcttcgagccggtcagcctggccgatatcctcgcttcccttgtggccctgtattccgcggtgttgtacggccgtgacaaggcatggcgatggacggggatcgccgcaatatcggattccgtgctgttcggctgcaagatcttcgccgctcaaaccgggtatcggagcatcttcagcatgctgactcattcccgcccggcatattccctcgcggcgacgcccgccgcgttcgcatcggcaatcatgttcatggtgatatcgctggcgttgtgcataagcgcgacggccatggcacaatgggaccgatccagcggatcgaacgcgctggtgctgcaagcccgcgaggaggcgttgtgcgcggagcaggccaagcagcgcatcctggcggcgaacatggaacgtgaccgcatcagcgagagcatccagtccgaggtgacgatgacgctgaccagcgtgatcgaccaggcggtcgccggcctgcgcatacttgacgattgcgagcgtcacggcgaacagccgtcgcccggggccatctccgaggcgttcgcggccatcggatcacagggccgtgcggcgctggcccacatgcgcaagctgctgggcgtgctgcgcgagaccggattcagcgatgaggctcaccggcaagagcagcccggcatgcagctcaggcccgcggcatcgctcgacaagcagctgcacgatagccagctgcacggcatcgcgtcgtaatgagacggcgctccacggcccgccggggatcatccgacatgaattcagggttaaatcagggggcgtgatgcgggacttgttcgccgatgttggatacagtggaaggcatgagtgagttgcaaagaattcgggtggtcatcgccgacgatcaggaactggtgcgagcgggattcgcaatggtgatcggatcccagccggacatacaggtggtcgggcaggcgggcgatggcgcccaggcggtgtcgttggccgaatcgctgcaccccgatgtggtgctgatggacgtgcgcatgcccggcatggacggactggaagcgaccagccgcatcagcgcgctggaagcggccgccggagacgcgccgcgcaagacccgcgtgatcatcctgacgacgttcgacttggacgagtacgtgatggcggccatcaacgccggcgcatccggattcctgctcaaggacaccgagccggagacgctgctgagttctattcgcacggtatatcagggcaacgcgattatcgcgccttcggcgacgaagcgactcatcgaaaagatgatggaggacgggtacaccaagcatgggttgacggcgactgacggctatgcggacggttcgtccacgatgcccggcgcccggccggtggcatacactgacccggaactgaacctgctgaccgagcgggagcgtgaggtgctggtggagatcgcccatggattgtcgaatcaggaaatcgccgacaagctgttcatcagcccgccaaccgcgaaaacgcacgtggcgcatatccttgccaaaatcaatgcgcacggccgcgtccaggccgtcgtcttcgcctacgacaacggtctggtataaggcgaatataaaaaacgccccccgctggcgggggcgcgatgctcagtccgccagcggggacgctagttgtcagatcgcgtgcttgcggcggatcatcatgatcgtgacgccggcggcggcgatcaggatgaacgccgaggcgatgccggacacgtccgcgccggtcttcgacagcggctgcgtgccggaggggttgcggtcagcggcattgttgacaccggtgttgccggcattgctaccgccgttaccgttgttgccgttgttgccactcgtctcgcgcacgaccgaggcctgcgcttggccgggctcgaccttgacgacgttcttgccgtcggcgctcagcgtgaccttggcgctgtaggccgcggcgaggttgactcgcgcccagccctgcgacgaggcgtccagcggatagccggagtcaccttcggtcgcggcgagcacggccttcttctgcgcggaatccagcgacttgaacgcggcgacgttgtcgagcatgcggacggccgagtcaggcaccaccggcgcctgtccggtcgtgcccgtggcctggaagccataggtcatgcgggccttgtacgcggccagtgcggaggcgcggtcggtcaccggcctggtcgaaacctcgtcggtgaaatcgttgcggtagccgttggcggcgttcgcgccggtgttcgtgatgcaggcgtcgagcgtatcgccgtggttgtcggccttgcactgcgcggtcaggtaatcgacgagctcggcgcgggcggccgcgccttcctgtgcggtcttctcgtcgctcactgcggtggcgacgccgtactggccggcgatgtggccgcccatgatgtcgagcgggtagtgcacgccgagcacgatgcggttgttgccggcctcggacacgcgggtcatgatctccgggccgagctcgggcagcaggtacgccaggccggcgccctgcgtgaacgcgaaggtggtgtggccggatgggaacgagccggagttgtacagtccgtcatactcgttgtcgggcgcttcgccgtctccccggtcgaagttctcgtaaccggggaccttcttgatgttcagcgtctgcttcagaccgttcatgttcagcgtcgtgccgttgaagttcacgcggtccacgtaggggcgcgggtgctggtatgtggccttggcgacgccggtggaagcggacttgttcatgtcggacaggaactgggcggtcttcggcaacttaccagcgtcggcggcgtccttgtagtacttgccgagcaccggaccgagcgcgtcgtacagcgtgttggtggagttcatctgggcgtcggacagggcgcgctggtcctgcgcggtgttgccgtcggtgccgtacgccttgttgttgatgtcttcggtgagctggtcgtcgtgcgcgagcaccgacttgccctcatcggtcacgcccttgcctgcgacgtagtacttgttgaagtcggtcagcagtccggtgatcgtgtccttggaggatgcggtcttcaccacggtcggcgccttggcgccgaaggagatggcggtgatggtgctgccgtcttcgctcagcgtcaccttggcgctgaaagccttggcgaggttgatgcgctcgaatccgttggagctggcgtccagcgggtagccggagtcaatttcggaggcttcgagcacctgacgacgctgagcgtcggtcaggtcggggaatgcggtgagcagcaggttctccgcgccttgcggcacgacgggcgcctgaccggcggccgaggcctgcgagaatccgtaggtcatgcgtgcggtgtaggcgtcgatggcggacgcgcggtcggtcaccggttcggtggacaccgcgtcggtgaaggtgttcttgtatccgttcttgtcgttggcgccggtcttgctcacacacgcggcgacggtgtcgccgttgccgtcggccttgcagcgtgcggcgatgtagttctcaagttcgtcatgggccggcagcagcacgttctggcggaacgtggcatcagaccacagagcggtgacggatgcgctggcggagatgcgtccgccgatcacgtccatcgggtagtgcacgccgagcacgacgcggttgttgccgccttcggcggcgcgggccacgagttccggtccgagctcgggcagcagcgtggccaatcccagaccgcggttgtaggtcttggtggtgtggccggacgggaaggactgcgacggctcctgatagtcggtgtaatcctcgccgtattcctggccgtcgatattgatcatcgggatgcgcttgatgtcgagcgtcgggctcagaccgttgaggtcggtgtcaccgccgatcgtgcggtcgacgccttcgttctccttgttgaagtacggacgcgggtagttgaagtccttcttggcgctgccggtgccgatgaagcccgcgaacgagtccttgctgcttttgctgaacaccaggtcggaggtcttgggcagctcgccctgcgcgacgccctcggccacgtactggccgatgatcggcccgaacgcgtccttgtagatgcgcagtgcgtcgccgtcgctcgcgtcgagagcggcgcgctcggcctgcgtgtaggtgccgtcgaccttggtggtgtcggcggcggccttgttgttgatggccacgacggtcttgtcgttctgtccgagcacgctcttgccggcatcggtgaccttgccgcggaaggcatcgccctgcggcgtgttgttcacgaccttcttcggggtccaccagttgtaatactcgccgagcagcgaggtgatgttcggcttgaccgcgctgccgtacgagggagtgtccgcggcgttcgcggtgacgctcacggacatcagcatcgcgatggatgcgatgcctgccacggcgcccttgaggaccgcggacttacgcattgtcttgtgcattctttcagcttccattgtgtgttggttgatatggaaccgattctgttgtagaccaactgtcaggttccgaccgctgaaagataatgaaaatcaccttcgattaatgaacagttcattttgcaacgtaccgattttttgcgtgttcaggttataacatcgcgcgtcgggagccgcgtgtcacgggtcgtgcggtataacgccatataggcgatgaggtcccttcttttgagtgaaagaagggacctcattgcactggcggctgtgttgaccatccaccggctctacgaactaggcttcagccagagcctcgacaggctgaaccgtcaaacagacagtccagtggactgtctgtaggtgaagtgagcggcttgccgcgaaggccgcctaagaggctcaggcttcagccagagcctcgacaggcggcgtcttgactgcgcgacgggccgggaacacgctggcgagcagggctgcgatggcggccaccacaagcacgatgccgttcatgccccattcgaaggggaacaccgtcttgccgtacaggctgaacaccatgtacgaccccagccatccgaacagcgtgccgagcaccacgccgaccacacctgcgacgagcgacagcagcagcgcctcgacggccagcgagcgccgcagctgcccgcgggtcatgccgatggcccgtaatgtcgcggattcgcgggtgcgttcaatcaccgacagagtcagcgtgttcgccacgccgatcagcgcgatgagcaccgcgacggcgatcagcgcgaccagaagcatcagcatcgagttgatgatggtctcccattgtgcgcgttgcgccacgggaccggtgatggacacggtggagtcatacgaaaatacgtcctgaatcttgttgaacacgtcactcagggagacgccggccgactgggtatccacacgcatgagcagcatgtggctggtcgcggtgatgtcgccgttgttgaaatggctggtgttgatgaaggcgacggcatcatagttggacgagacgctgcggtaatcggattgcaccggcttgagacgcattgatgaggaaacgcctccgttcgtcgagcttgcgctggcggacccgtcttgttcggtgcttgccgcaatgccattcgactccgcggcagtgaaccgcagcttcgcatcggagccgaatgtgatctccttgcctgaggtggcgcggtatttcggcagcagcacggtgtcgtcgccgacggtgacgccgctcaggtcggcgtgcatgacgccggcgagttcggaggtgttcttgacgccgacgagcagcagggacatcgttcccccgttcacgccttccgcggtcaccgtcgccgtgggcgcgtacatggtggccgcgacgcccttgacctgggccgcttccttgactgcgctggtcttcaggccgtcgccggtggcgatcatgtcgacactgtaccgggacgcgagcgcctcccccatggtctgcttggcgctggctgcaccggtggcgatggtggcgaccagggtcacgccgatcagcagcgcggtaccggtggcggcgacgcgacgcgggttcttctggatgttggcgtgggcaactttggcgctcggaccgcacatcgagacgagcgcgccgacgccgcgcatcagcaccggcagccagaacgtggcggtgagtacgagcccgaggaacaccagcgcggccccgccgatggacatcagcagcacactgctgtaattgtcgccggccatggtgtccagaccgttcagcatgccggacagctgccatacggcgacgccagccagtgccaatcccgcgatgatcgtcagaacgccaatcgtggcgcggacctttccggcgcgtgatgtatcggtcagctcgatcgggcgcagggcctcaagcggcgtcacgctggtggcggaccgtgcggagccgagtgaggcgagtacagtcatgatcaggccgaatgcgatcggaaccacgaacgcttgccacgagagaatcagcctggcctgcattcccatcatttccattacgcccgtgttcgtgaccagcgcgatcagaccgacgccgaagccgacgcccagcaccgacgcaatcagtccaagcaatccggcctccatcagtacggatgtgtacagctggcccttcttcgcgccgattgtgcgcagcaacgccagcgtgcgcctgcgttgcgccaccagcacctggaacgtgttggcgatgaccagggcggcaacgaacagtgcgagcacaccgaagctcagcaggaatatggtggggaaactggtgttgttcgagctgaggtccctgacggcctccgcctcgaccgatcggcgcgattccacgccataggatttcggcaggagcccggagacctcgtcgacggtccgctgcgcggcagcggcgtcggcttcgtcgatgtcaagcaggagcatgtacgcctgcatatggtcgaaatcatccacgccgtataccgcggcgacgacgttctccgacagcaccgaagcgccaccgtaaaacgagtacacaccaaacgggtcgctggtcaggccaacgacgcgcacgtcacgcaccgcggtgccgctcagagcgctgccgttggatatcggagcgacgtccaccttgtcgccgacacccactccaagttgtttggcgacggattttggcaacgccacctcgttgttgtcgaccggctggtcgccggagacgatgcggaccggcagcagcttacggtcggttgacgtgccgacggcgtatccgttcgagcgcttgcccgctgcggagatcgaaacgctgacggacgtgtcgacgcggacgcccttcacgcctttcgtggcgcgtatccggtcgaggttgaaatcggcgacggtggttctgtcggccgagccgttctcggagaccgcgccgttgctgtttgttttcatcgtggcgatgtagttcgcttcgccgagctgggcggtcctctgcctgcgcagcgagtcgtccatggagttggagaacaggaacgtggcggcgatgaacgccgtgccgataaggatggctatgcctgcggggatgagcatcctcgcgctttttttcatgagtttgatggtgatggagaacatgagaagtccttaatgctgtgggcgggtcagcggcggtgctgggcgacggcggcgtgctgcggagcgcccggaacgcttggagcacccggaacgaaagacgccttttcggtgtgccccttgagggccgccaccggcggtcttggaacggtggtgcccgcggacggcccgccgaccaattgggtggcccgctcgcgctcgttcatcaacagttggttcatgctctcggcggtcgggcgctgctcgtcggcgacgatctggccgtcggcgaacacgatcgcacgatcggcataggatgcggcgacggcgtcatgggtgaccatgatgacggtctgcccaagttccttgacggatcgcttcaggaagctcagcacttcggcgctggagacggaatcgaggttgccggtgggctcgtcggcgaacaccagcgacggtttggtgatgagcgcacgcgcgatggcgacgcgctgctgctggccgccagacagttcattcggccggtgcgtgagacgttccttgagtcccagcgtcgtcgtcagcatgtcgaaccactgacggtcgggcttctgacccgccagagtcaacggcatgaggatgttctgctcggcggtgaacatcggcagcaggttgaagctctggaagatgaagccgatcttgtggcggcgcagcatggtcagctgattgtcgttcatggtggtgatgtcggcgccgtcgaacacgatatgaccgctcgtggccgagtcgagtccggcgagcgtgtgcatgagcgtggacttgccggagccggacgggcccatgatcgcggtgaacctcccttgctcgaaccgcacattgacgccgcgcagcgcatgcaccgcgttttcgccatgcccgtagtccttgaccaggtcgatcgcctcgatggcgatggggtgccgctgttcctgcgccgcaccggcattggtctgcggctgcatgatctgctgttccataacgtcctcttccatatcaatacagggattttccctgaacgttactttcaccatacggatggcgggctcggaccggcatcgtgcggcggggtgaatcgccatcgtgcccatcatccttgagtattacgcgctcgaacattgtgcgcggtttcactgcgctcggcggcctctctcggccgggaacgcacgggtccgtggcgatgacggggggatgatagggggggtgcctggcaagaagaattgtacgatgagcgagaacagtgttgagaacgagaatggcgaaacgtccattttccaatgattcttagatttgccctcacgccccgaaacggcatgtaaccggttaaaaacgatttcgtggcacagggaatgccacgaaatgccgaaaacagcgttttttaccgtttcgtggcacgaaaccccctgcttgcatcactgttcaagacaaaaatgccaaaatgtggtcagaacggagctgaacagcaggatcggaccatacgccctcccgctggcgggaggtggcgcgaagcgccggcgggtggttgtgcggcgacatcccccccgcttcactacagcccgccagcaagggctatatgcaacaaacccgcgctgcatgacgtcagcgcgggtttgtacgggttccccttctcgttccgtgtcacggttccccgaccggcgacgcggaaaaaccttgcggctatctagccaagaccatcacttggccagtccggaggcgcgcagcgcctcgaagccgcccttgaggtcgtcgaggatgtcctcgatgttctcggtgccgatggacaggcggatggtgccctggtggatgccctgatcctccagctcctccagcgtctcctgggagtgcgtggtggaggccgggtggatgaccagcgacttcacgtcggccacgttcgccagcagagagaacaggtgcaggttgtcgatgaagacacgcgccgcgtccttgccgcccttgatgtcgaaggtgaagatggagccggcgccgttcgggaagtacttcttgtacagctcgtggtcgcggcgcccctcgatggacgggtgcgagacggactcgacctcaggcacggtctgcaggtactcgacaaccttcagcgcgttctgcacgtggcgctcgacgcgcagcgacagggtctcggtgccctgcagcagcaggaacgcggcgaacggggacagggtggcaccggtgtcgcgcagcaggatggcgcggatgcgggtcacgaaggcggctccaccaagggcctcgtagaagttcagaccgtggtaggagggatccggctcggtcagggtcgggaacttgcccggcacctcagtccagttgaagttgccgccttccacgacgacaccacccagcgtggtgccgtggccgccgatgaacttggtcgcggactcgaccacgacgtcggcgccgtgctccagcgggcggaacaggtacggggtggcgaaggtgttgtcgacgatcaccggcagatgatgcttgtgggcgattgcggagatggcctcgaagtcgggcaggtcggcgttcggattgccgaaggtctcgaagtagacgagcttggtgttctcctggatggcgtcctcgaagttctgcggaacctccggatcgacgaaagtggtggtgatgccgtcgcgcggcagcgtgtgcttgagcaggttgaaggtgccgccgtagatgttcttggaggagacgatgtggtcaccggactgggtgatgttgcgcacggcgtactcgacggccgcggcgcccgaggcgaccgcgatgccggcggtgccgccttcaagggcggcgatgcgatcctcgaacacgccctgggtggagttggtcagacggccgtagatgttacccgggtcggcgagtccgaagcgggcctcggcgtggtcgaagttgtggaagacgtagctggtggtcgcgtagatcggcactgcgcgggagtcggtggccgggtcggcctgctcctggccgacgtgcagctgcagggtttcaaaacggtacttcttgttggcttcggtcatggtggtcgctccttttcccatgtcgggatgctgtggtttccgtgtctttcttgtcgccacccgtcggcggtttccagcgtctggcgaggtgttggtttagaccatagggcacatggatgcggcatcgcaagtccggcgttatcgcggttgcctataaccctttaaaagccgttggcatcattggtgtcgcaggtcgtaacaggagccctagaaccgactatccacgatgcgacacgccgctgccgtcagagccggttccacaggtcacggatcatgtcggtgatggtcaggtcgcgcagggataccatcttcgggaacgtgcggatcagacggcgctgctggcggttgagcgagcgacggaccagctcgccggcatccgcaaccggtctggatgccgcacgaatgccctgctgggctccggccgcgaaccggtcatacgcctgctccgcctgcccgcgcagtttggcggacgtttcgcgccactgctcgtcggcctcgctgatgcgtgtgtcgatctgtctgatctgctgcgatttgagcgccttgatgccctcgctgaccttcgccagacgcgagtcgagactgcgcagaccggcttgggtgatggccgcatcgattaccaccacgatgaacgacagtcccgcgacggcgtgaagcagccatatcggccaggaccggacgatgtcggacatccacggctggaccaccagtttgatgcacgtcgcccccgcgccgaacgccaggaacccgttgagatacacgcgcccgttgatgttgaacggcttgccggaataatcccagaaacgcatgtgatacagtttctcgatcgcccagctcgacgcatattccagcgtgcatgcgagcacgccgctggacaggaacagcgacagcggattgttcacgtcatgcagcagcacgacgaccagcagaccgccgaacccgtagatcgggcatatcggcccgttgagcatgccccgatcctcgaaccgcttgcgcagcacgacgctcaggccggtctcccacacccatcccacgaacgagtacgccagccaatacaggaagaagcgttccacgacaatcagaacatccataggcgtcatggcatcctccttgcgatcatgcggacggaaccgccgcatcgggcttcgtcccgtcgtcacgtgtatcagacaactctagcgcgaggcgtcacgttccggcttccgctcccatgccgtcgatacgatgcaggtggcacttcccggccgcccgccaccggtggcgcgctgggcgggaccgcgttacgcggtgtgcgcccgacgatgctagtctctgttgtgtatcgtcattgcctaccagtaaggggtgtttccgaatgaccgatgatgtgacgctgtatgaccgcgacccacattacattccgcgcgtggccgccgtgcacgacatgtgcgggtatggcaagtgctcgctgaccgcggcgatcccgatcctgtcggcggccggctgcgacgtgtgcccggtgccgacggccctgttctccgcacacaccaagtacgccgtgttcacgttccatgacacgacggacattctctccggatatctggacgcctggcgcaaggagaacgtcgagctggacggcgtgtacagcggcttcctcggctcccccgaccaggtgtccatcatccagcgcctgtaccgcgaatatccgtccgcgctgcggctggtcgacccggttatgggcgacgccgggcagatgtacccgacgtacacgccggaactgtgcgaggcgatgggggctctggcggacggcgcggacgtgctgatgccgaacctgaccgaagcgagcatcctgaccaggcgcgactaccccgggcaggatctcgatgacgccgccgtgaccgaactgctggacgcgctgctgggactcggtgccaagaacgtggtgctcaagggcatcgaccacggtgacggcaagatcatcaactacgtggcgagcgccgaaaagggcgctgccgagaaggtcgagcttgtgcacgacaagctgccgtacatgatccacggtacgggtgacgctttcgcgtccgcactgtgcggtgcggtgatggccggccgcggcctggccgaatcggctcggatcgcgggcgaattcgtacgtcatgcaatggaaagcacccgcaatcagccgcatttcgaggagcgcggggtcagtttcgagctcgatctcggtgagctcacttcgctggtgaagtgagaccgtgccgcaaagccggcaaaacggaactgcgccgaagccctggctgggacttcggcgcagttttgtatcagaaccactctgactcggaaccaaggaatccggcctgaggggaaggcgtcaggccactcccgtatcgcagctctcagtattcgcgcgtcttgggcgggaagtcattgatgtgcacggactgccacaggatggaggcgtgaggtgccgatgaagcctcggcatcggcggcatcggccatcccggtcatcgaatgtgcgaggaaacgttcgtcgtcacgcgccggataatcgagcctttgcagggagccgcgcgattcgtggcgcgcctcggatgcgcgcagcatggcttcggcgagcagtgtcaggtgccgtacctcccagatcgcggttatctcctgattgaacgcgggcgtctccgaatgcgccgtgagacggctggcgcggggacggatcacagtatcgagcaggttcagggcctcgctgatggaacgggcgtcgcaacgcaccgccagcgcatgttccatcagcgttcccagatcggcggcgagccgatacgggttgtcctccttggaaccgggctgcgcggaagcatctgagccgccgagctccgctgcctgcggcataccatcagacgtatcgtctgccgcgtcatcgtccacgtccggtctgcccgcaagcatcgtggcgacatcctgcttgcgcgaacgggcgacgtcgtccaccagcgcggctgccgcctcggcgggaccgtcatccgcatcggcgtcgcgcatcgggtcgtcgaccggcgactgtgcgatgcgggccgccagcgactcacctgcgcgcgtgccgaacaggcatgcgtcgagcagcgagttgccgcccagacggttcgccccatgcaccgacacgcacgagcattcgcccgcggcgaacaagccctccacgaccgtgcggctaccggaatcggcgtcgccgttctggctccctgactccgcccagcgatacacctctccatccgtggtgatcgggatgccacccatcgtgtaatgcgcggtcggtttgaccggcaccatgtccttggccggatcgaggttcgcgtacgccttgatggtctccaccacctgcggcagcaccgcattcatatgatccggatcgatgccggtcatatcgagccacacgcagtccttcggaccgtccgggtctttcgggtccgcgacgccgcgtccgccgtcgatctcggccatgatcgaacggctcaccacgtcacgcgcagcgaggtcgcgatgctccggcgcataacgttccatgaacgcctcgccgtcggcgttgcgcagcacgccgccctccgcacgggcggcctccgacaggagtatgcccgtgtgcgcgagacccgtcggatggaattggacgaattcgatgtcttccagctggagtccggcggacaacgccaaggccatgccgtcgccggtcagatcccatgaattcgacgtggtgtggaacagtcgtcctgcaccgccggtggcgaacatcacgttgtgcgcatgaattgcgtgggtgacgccggcgtgcgtgtcataggcgaccacgcccgcaacggcgctccccgacttgtcaagcaccacatcggtcacgtaccattcctcggcgaattcgatgccggccgcgacgcactgctgccacagcgagtgcaggatctgatggccgatgcggtccgccgcatatgccgccctgcgcacgggcatcttgccgaaatccgcggtgtgaccaccgaaccgtcgctgcgcgatgtggccgtcatcggtgcgggagaacgccacgcccatacgctccaggttgatcacggtctgcggggcgtactcggcgagcagcttggccgcatcctgatcgaccagccagtcgccgcccttgacggtgtcgtagtaatgccaatgccaatcgtcctgttccacattgcccagactcgccgcgatgccgccctccgctgaaccggtgtgcgagcgcaacggctgcagtttggatatcaccaggaccttcggctcgatgccggactccttcaactgttcgatgtcaggggagtgcatcagccccagcgccgccgacaggccggccgccccggcgccgacgattaccgcgtcatacatttcttccacatgtttcggactcatatccaagattgtcgcacaagggctgacgttcgccgcgcacgtgacgggggcacggcggataataccgttcatggaagaaatatccgacagcacgacaacgcccggcaatgcggcaacatccaacggcacagcgtcatccggcagcacagcgtcgtccaacagtgcgacatcgttcaacagtgcggtgtatgacatcgtccggcggatcccgcgcggagcggtcgcgacctacggccaggtcgcgacgctggccggccgcccccgcaatgcgaggttcgtcggcttcgcgctgcacgccaatcccgaacccggcgtgattccctgccatcgcgtcgtgttccgtgacggttcgctggcgcccggcttcgcgttcggcggcccggagcggcagcgcgcgatgctcgaagaggagggtgtgccgttcatcccgccgcgggcgggccacgacaatgccggtgacggtggatggcgtgtcgacctggcacgatgccaatggcaggcgtaacgcacgccaaggcgccatgctttcgcctgtgccatccgccacgagtgagtatcgtcatcatgatctccgtctccctccgatttccggaacgatggagatgcgaccgttctcgacggttatcagtccgatgagctccatcgtccccaattgcgagagcacatgggcgaccaactcatgcatgccgcgttccggcaccgcatccgctccctttccttccgttgactttccttccgttgacttcccttccgttggcttcccttccgtcgcgcccgtctcaaggcctttttcacctgaccgggtgcgcagctgttcggcgacggattgcgcggtcggggctatccgccggcgacggcaccatcggatggcatcgatgatcgcccgctggctctcggtcatcgccgatgacctgttgccgcccgatgggctgctgtcgcgcaatatgccggcatcacgaggcgtcccgacatcgcagtccgagccgtctttccgttgagtggccacgtcgtgaaacgactccggcggatgcggggcatgccagacgtcatccatgtcggcgacggagcacacgatggtggcccgttgctcctgaatgagccggttgcagccactgttgcccggcatgtcaatgttgccgggcaccgcatggatgtcccgctgcagttcgtttccccagttcacggtgttcagcgcccctgaacgcagtctcgcctgagtgaccaccagcgttgacgaaagcgcggctatgatgcggttgcgcgacaggaaccgcctcgcctccggaatggttcccgggcacagttcgctgaccagtgctcccccgttttccgcaatcccgtcgaacaactcactgttgcactgcggcccggcatggttgaggcctccggcgaacacggccaccgtgcgcccggcccgtccgatgccgtacgcccgcatcgcgtccaatgctcccctatgggcggcggcgtccgcccccatggctccccctgaaaccaccagatgcccggcttgcgcggcatgcacggctatgtccgtcgtcagtcggcgcccatactcgttgacgccgcgcgagcccacgatgccgacgggctgcgggcaactggtcaatgccgcgcgatcgccactgccccacaggcacagcgggggcgcgcaacgacccagcaacgccaggtcgttgagacgggtgggccaccatacgtcatgcggcgcgatgatccattgcctcccctccatggtgaaccagccgcagagataatccctgtcccacgtggggagagttcgcaatcgttgctgccatttcgccaacgcggagcgaaacgaacgcaccgcctgcggcgtgggcttgctcccccatcgggtcatgccgatgcagaacgcctgctcgatgaccttccccgcgccggccgacgtgcgcagttccgggtcgctgtcccggatgagggtgagcgcttcccacgcatcggccgtgcccttgaggagcgcggtcatcagcgcgtctgcggtgttgaggcagaatgtcaggatggcccgagcgagcgtctcctcgtcaaggtcccagcaaaggccgctatccgactcgcatacagtcatgacatcctcgctctcaacatgatgccttgcgacatctcgtccggccccggcgacgttttgcccgccagatcggccagcgtccatgccagtcgcatggcccgatccactccacgcaggctcagccgatgcgacgccagcgccctgttggcgagttccagcgccttcaccgacgtgttggcgcgcatccacgaccccggcacttcggcgttgcagccccacccgtatttggaataccgttcgccggccgccgcccgcgccgcgatcacctgctgctgcatgacgtggctgccaatcgaatcacgggtcggcgccgaggctatgcacgggaccggcggcacctccacctgaatatcgatccggtcgagaatcggaccggacagtctggcgaaataccggatacggtccttctccttgcacacgcagcgctccccgttgccgtaggcgtaaccgcacgggcatgggttggctgccatgaccatctggaacatcgccggatagtaggtcgtccccttcgtgcgagacagggccacgtacccggattccatcggctcgcgcagcgtctgcagcgtcctcgcggagaattcaggggcctcgtccatgaacaggatcccgcggtgggcgcgcgtaatcgcccccggcatcgcaagccctgatccgccacccaccagcgacgcggtcgacgccgtatggtgaggcgcctcgaagggcggcatatcggagatgccataatgttgcagcgtgccgcacagggagcgtatcgacgccacttcgagctgttcctccggcgtaagcgggcacatgatgctcggcatcctggaggccaacatcgtcttgcccgagcccggcggtccggtcatcagcagatggtgtttcccggccgccgccacctgcaatgcccacttgacatgatcctggccgaccacctcgctcatgtcacccaatccgctgaaggccggcgtgtcctcgaccgtgcacgagaccgtcgcacggtcgacgccaagcgtatacgacgctcggcctcccgccagctcgatgagctcgcccacatgacggacgcaggtcacgtccatctgcggcaccaggcgggactcgtcctcgttgccgtaaggcacgatcagtcgccgtatcccccgctccttggcatgcagcatgatcggcagcagaccatggatcggcagcacggtgccgtcgaggttcacctcccccagaacgatcgtctcctccaggctgtcgtgcggaatcgcccccgccgcgctcagcacgccagccgcgatggcgagatcgtgcgaggcgccccgcttgggcatcgacgcgggagacatgttgacggtgacgcgggtgtccggccatttgaacccgctcgcctggcaggcggatttgacccgttcccgcgattcgctgagcgaggcatccggcaggccgatgacgctgaaatacggcagaccgggcgagatgaacgcctgaatctggatgatgaaggccttgagaccaatcaggccgaccgaaagggaaccgccgatagccatcagaacgcccccggtatgtggtgcaccgacaccatgcccgcacgcgcgacgatagtgagcacgtcgaaccgcacccccgtatgcctgatgcggtggtccggctcgagcagccactgcacgccggcgcgtctgagattcgtctgcttgtgcagggtgacggcctcctgcggcgtgccgaaatggtcggtccgtctggtcttgacctcgacgaacgcgatgacgcggtcgggcgtcatcatgacgatgtcgagctccccgtaccgcgaatgccagttgcgccccagaatcgtgtatccgtgccgttccagccaatccgccgcatattgctcccccagcacccccagctgcttgggtttgagcgagccgtcgcacagccggcacagcatatcgctcagccccgccacgggaggatcatgatcggtcgtagcgcctgcgtgttccgctcggcttgtcaaacaggtgtccatgaccatcagtgcaccataaaaccgccttcgaccacatggttttcgtccaatgtggtcgaaggcttgcccttcggcgtgttgtggatggaatgtggatgaatatccacttatccacatcgccggcacgacgacgattccgtgcgctgagctgaggcatgggcgcgcccgccaaggccatgccttatggcaaactggttgacgattctttgacttcaggaggcatatatatgagcggctcaagtgacgcgctggccacggtgaccttgcgggtgaacaggttcacgccgcgtcccgagcgtgatcgcccggcccgctccggcagccccttcgccaagaaaagctcgccattcggcggcgcctccgcttcggcgcgtcggcgtccccgcggcaagcagtgggttcaggagtacacgctgccggttcgccgggaggatacggtgctggactgtctgctgaagatcaagcgcactgtggatccgactctggcgttccgttattcgtgcgggcatggcatgtgcggttccgacgcggtggcgatcaacggcacgccgacgctcctgtgcaccgcgaccgtcggcgactgggcgaaaccggcgacgccgattcccctcgccgatgacgagggattccgccgcaccggcgacgcgggtgataagcggagtgcggacacgaccgctcccgaaggaaactcttgcgaagacaacgcaggcgcgcaatcccacgaactcggcatcatcgaactggcaccgctgccgggattccccgtccagcgcgatctgatcgcggacatcgacccgatgctcgaccagatcaggaagctcaagccgtatctgcaggccgatggcgtgctcgcgaccaccagcgaaggcaaggtggacgtgttcgaataccttcagcggccagagcagctggcgaaatacgagctgctcagcaactgcatcgcctgtggcgtgtgcgagggagcctgcccggtctacgccggcggcgacgccttcattgggccggcggccctgatctcggcctcccgcttcgtgaacgattcgagggacaccgcaaccgacgagcgactggatgccatcgacaccgccgacggcgtggccgcttgccaatccgtgcgcgcctgctcgcgccactgtccccgcggcatcgacgtcggcgaggagatgtggcagatcgtcgcccgcgtccgagagcgctgacagaccgaaacagacaccattcgacaacggttcaggggattgtttatggataagacctcatatgcgaatctcgccagggcatgggagtacgtcgagaatcatgcctattcccggcagacgcaagcgctgctggacgcgcgcgaacaggccgcccagtgcggtcttgcgcagggctccgcagctcaggcgcagctgctgcatacgctggcatgcatgatgcgcagcacctcggtgatcaccatcggctccggctcactcgtggagatcgtccagcttgtcgatgcgctgcacggtaccggccagttgacggcggtggattcctcgacgcagggaatcgcgctcatccgcaagatgttcttcgccctgtccgacacgacacaaacgacgctgcgcgcggtgaacgcgccggtgaacgtgtttctgccgcgtctcaacggcacggattacgacctgatcgtcgtctccggcgatgcggcgaactatttggacacgtttgcccaggcgccgcggctgctccgggagcacggcgtcatcgtgttcaccgacatgctcgcgttcgagggcgacgaggcgaacggcggtgtacccaatcccgctgaccgcagcgacaaggcggtggtcatgcggcaattgctggacatggttcaggacgacgaccgtttcgaatcctctctgactccgaccggcaccggactgctcatcgccgtcaagcgctaggaggcgatccggctgaccgccacttccacggcctcgtcggggtcgtccgtgatcagtaccagactcgggtcgagcggcgagatcatgccgtgatcctgcacggtcgatgtcagccattcgaacaggccacgccagtattcggtgccgtacaggacgatcggcatcgacatgaccttgtgcgtctgcaccagggtcagcagctcgaacatctcatcgaatgtgccgaatcctccggggcatacgatcacgccggacgagtatttgacgaacatggtcttgcgcacgaagaaatagcggaagctcatgcccaggttcacccattggttgagcccctgctcgtgcggcagttcgatgcccagtccgaccgatttgccgccggcaagcgccgcaccacggttcgcggcctccatgatgcccggccctcccccggtgatgacggccacgccatgctttgcgattccacgccccatgcgccgcgccgccttatagtccgggtcggtgcgcggcgtgcgggcggagccgaacacgctgaccgccggcccgagctcggcgagcgccccgaacccatcgacgaactcggattggatgcgcagcacacgccacggatccatgtggagccaatcggtctcctgattgggtttgagcaggttggccgtagtgttgtcgttcggaatcatcgggccgcgcagaatcaccgggccccggtgataggtgttgcccaacggcgatgcatcctgctgaacgccggagacggcggcgcgtaccgccgcgtcacccgtctgccgcccggcagccgatgatttccctcgttcggcacctgccgcggcgatgatgtcgttcagcgcgttgttcgccgccgcgtgggcgagcttctgcgcggccagtttacgcagcttctttttcttgccgcttttcttcgacgcatccgttttcgacatgatcacgcactccttgtcttggatgtctccaacataccagcagaagctccgttacgacgccgactccagctcctccttctcgaaccgcttggactgacggctcaggaggatgccgctgatgagcgccgcgatcagggatgccatcagcacgccgaaccgtccttccgcagacagctccgtgttcgtgtaggccagagaggcgatcaggaacgataccgtgaagccgatgccgcacgcgcaggctgcggggaacatgtcgcgcacgcgcagtcccttcgccatcgtcagcccagccacgtgcgtggacagccatgccgtgatcatgatgccgagcggcttgccgatcaccagcgccacgatgatgccgatgaccacgggcgacagcatcagcgccggggacagctcggcgaagtgcacgccggtggcgaacagcgcgaatatcggcagtgcgagcagcgaagagaatggctgcagcttgctcgcatagcgttgcgcgcgcggcgacttctcaccgtgcatttcacgcgacggcgtcagcaggccgaccagcacgcccgccagcgtggggtgcacgccggcctcgaacatcatcacccatgccagtacgcctatcacggcgaccagcagccatgggacgcggcgcaatctcaccaggaacgcccagatggccgcgcatatggcgatgccgatgaaccagtaccatgcgttgagcgacgagaagaacaccgcgatcaggatgatcgccagcaggtcatcgaccgtggcgagcgtcatcaggaacgctcggatcgaaccgggcagcgccttggcgaacaacgcaagcaccgccagcgagaaggcgatgtccgtcgctgtgggaatcgcccacccctgcgccgcttcggcgaacgggatatccgcgccggtcgggatggtgacgattcccggcgcaggcggcgcgaaccgggagaacagggagatgaccgtgatgaacagcaccggcggcatcagcataccgcccacggcgcacagcatgggcacggcggcggctttcggattggcgagcgaaccggtggtcagctcctgtttgagatccaatccgaccgtgaggaagaatatcgtcagtaggccatcctgcgcccaatgcccgatcggcaggatgatgttggtgccgggaatgcccagctgcgtctccgccaccgcctcgaacatgtgcgacgtccatggcagattagccaggaccagaccagcaaacgcgaacgcgagcataatcaggccggaaatacgatcggacgcggcgattcgccggatcctggcccaaaccctacccgtgctattcatgaaccctcaattccataccaggtgaacagcctgacgcggacgtatgcctgacatgtcaggattcggtgccatcagaccgactcctcattttacagacccccatcccactctacgccccgggctgagcctagcgaagcgagaccacaatcacaggggccaaaggcgagccgtgaagaaacagcagagctgcttgtaggcgaggactgggggaaaaggaggcgacggacaatccatatccggcgaaagtcccatttattcgtcgccggatgggactttcgcgggaaaggcgtggggatgattccccgccgatcgtcatccggctatcgcctgtaccacaccatgcgatttttgacggttttggggctggtgtggccaagggcgattccgggcccattcaccggtcattggaaaatggcggtttccgcgacctgtgctttgccacaccatgcgattttggggtgtttttcgcctggtgtggcacacgggatgggagcgaatcagccggacggatgggtagggactgagtgcgggctgttccattgagctgagaaccccccagtcatgccgcgcatgccagcccccccgccagcgggggcgataatgccgggcgccccgctgtttgcctcacggctcgccccgccagcgggccgagaggcaatcccagttgccgaaatcaggcgcgctgtgacagggctacggcgatgttgtccagcacctgcttaagcagcgccttcgggcaggcgaggttgacgcgctcgaatccggctccgttctcgccgaacagcacgccctcgtcgaaatacactcgagcgcggtcgcgcatgaaatcgcgcagctcgtccgccgaaccgaagccaagaccgcggcagtccagccatgccagatacgtgccttccggctcgatgagccgaagtccaggcgtgcgttccgcgaactcgcgcagcagcgaaaggttgtcggcgagcacgcccatgagcgcatccagccacggttcggcccgctcatatgccgcctggcacgcgacgagtccgaaatggctgacggtcaggccggcgatgttctccgccgccacgtcgaacgcccgcttgagttcggggttgacggtgatgacgttggagcacagcaggccggcgatgttgaaggtcttggtcggggcggtgaactcatagcagtggccggcgtagcgctcccccagcgtgccgaacatcgtcacgtcgtgtccggggtaggcgaagtccgcatggatctcatcggccagaatggtcacgccgtgggcgatgcagatgtcgcccaggcgacgcagctcgtcggcgctccacacgcggccgaccgggttgtgcgggttgcacagcatcagcgccgtgcaccgcggatcggacgccttggcctccagatcgtcgaaatccatgacgtaatgtccgtcgtcacccaggatgaggcggttgtcgagcatggtcaggccgttgtgctccgcggcggcggtgaaaggatagtagacgggtccttgcaggatcaccttgtcgccgggatgggtgaccgcacgcagtgcggtgttgaccgcgggcatgaccccgtccgacaggctcacccaggccgggtcgatgtcccagttgtgccgacgactcatccatgccgtcagcgcgcggaaatacccgtcggtcgcgtaatcgtatccgaagatgtcatgttgggcggcttcgaccagcgcttctacgatttccggagccggcttgaattccatgtcggcaacggacatggcaatcacgtcctcacttcccacacccatgtcatcctcgatcatgtgccatttgatggatgtggtgccgcgccgttcgaccacggactggaaatcgtacacgtctgctcctcgtatgtattcgatggcgccggaacacggtcgtgggcggatgctcctcgttgcgcctgtctgctgtgcgcccatccattggaaaagccctcggaagcattcgctttcaagggctttttgtgcgccgaacaggattcgaacctgcgacctgctgatccgtagtcagctgctctaatccgctgggctaccggcgcataccgcgcatattgaattatgcacaaccgtgaattacttcacggctcgtgcgccagacaggattcgaacctgcgacctgctgatccgtagtcagctgctctaatccgctgggctactggcgcatgttgtcttgtttgcggcaactcaaataaattacatcaatgtaatgactttagcaacttggcgtgtcgcgcgtgtcgcgaacgtgccgcgcgcgtccccgtcatgccacgaggcgccgttccccacggaccagtttgggcagaccctcacccctgaccgaggccgcgtcgacgatcacctgctgcacgtcatccatgcctggaagctcgaacatcgtctcctcaagggtcttctcgatgatcgaccgcagccctcgcgcacccgtcccgcgcgttatggcggtcgacgcgatggcgttcaccgcctgctccgtgaaggccagatccaccccgtcgacggcgaacatcttgcgatactgcttgaccagggcgttcttgggctcggtgaggatgcgcgccagatcggcctcggtcagctcgtcgagcacgctgaccacgggcagacgcccgatgaactcgggcagtagaccgaattcggcgaggtcgtcggcgctgacctgttcgagcagttcctcgggcttgacctcatggtcatgccaggaggccccgaagccgctctcgtggcgtccgagcctaccggcgacgatatcgctcagccccacgaacgcaccgccgcagatgaacaggatgccgcgcgtgtcgatggtcaccgtgtcctggtcgcggtgcttgcgtgtgccctcgaccggcaccgaggcgatcgtgccttcgagtatcttcagcagcgcctgctgcacgccctcgccggagacgtcacgggtgatagacgtgttctcgccggattttctggcgatcttgtcgatctcgtcgatgtagatgatgccgtgctgagccctctcgacgtccccgtcggcggccgagatgagccgctgcagcacggtctccacgtcatctcccacatacccggcctcggtgagcgtcgtggcgtcggtgatgacgaacggcacgttcataaccttggcgagggactgcgcaagatacgtcttgccgacgccggtagggccgagcagcagtatgttggatttggcgacctcgacgtcggcgagcggatccgtgcggcggcgacgcccgagcgcctgcttcttgccgtcgagctgcccggccgattcgtgcagttccatgttgacgcgcttgtaatggttgtagacggcgaccgacagcgtgcgtttcgccgcgctctgcccgatgacgtaccggtcgagataggcgctgatctcggcgggcttgggcagcgtcagggcgttgacatcggcgctgtgctggcgttcctccgagacgatgtcgacgcacagctcgatgcattcgtcgcagatggccgcgcttgggcctgcgaccagcttgcgtacctgatgctcggtcttgccgcagaacgtgcaccgaggcacgtcctcgttgtaactcaccacgcgccccatgcagctctccttcgactatgcgtcccgttatgcgcactgttacgaggatacccccggcctgacggcgacgggggtatccacttgtgaagattcatgaacctcacgaacggtgttcgagcacttcgtccacgatgccgtaatccttggcttcctgggcggtcaggaacgtatcgacctcgatgtccttgcggatcttctcgacatcctgtccggtgtgcttggcgagcgtgttctccagccattcgcgcatgcgcagcatctccttggcctggatctcgatctccgtggccttgccgaagccttggtcgatggccggctggtgaatgagcacgcgcgcgttcggcagcatcaggcgcttgcccttggcgccggcggccagcaggatcgccgcggcggaggcggcctgaccgaggcagacggtctgcacgtcgggcttgatgtactgcatcgtgtcgtagatggcggtcatggccgtcatcgagccgccgggcgagttgatgtacatcatcacgtcacggctcggatcctgcgattcgagcacaagcaactgggccatgatgtcgtcggcggacgtgtcgtcgacctgcacgcccatgaagatgatgcggtcctcgaacagcttggtgtacgggtcctgcgtcttcatgccgtacggcgtcttctcggagaactgcgggagcacgtaacggttctgcggcgagacggccgcgccgccgcgcagcgcgctctcgcgggctgcggcgggcatgaacccgacgacgccgcgcgggccggcgagacggtcagcgcgggctgcgaactgagcttcttcggatgccatttcgatcattctcccttcgtcatcgaatcgtgcgtggtgatgatcttgtccacgaacccgtactccagcgcctcggtggcggtgaaccagtggtcgtactcgttgtcgcggtagatctcctccaccgtgtggccggtctgttcggcggtcagctcgctcattgtcttcttcatatccatgatgagctcggcgttgatgcgcacgtcggtggtggtgccgccgatgccgccggacggctggtgcatcagcacgcgggcatgcgaggtcaggaaccgcttgcccttggtgccggagctcagcaggaactggcccatcgacgcgcacatgcccaggcctacggtcgccacgtcgggctggatgagctgcatggtgtcgtagatggccatgcctgcggtaatcgagccgccgggcgagttgatatacagccagatgtccttcttcgggtcctccgcggccagcatgagcatctgtgcgcaaatgcggttggccatgtcatccttgacctcttcacccatccagatgatgcggtccttcaacagacgattgaaaatcggatccggcatcgacggcatgtcgccgtccgccatcaccggggatgatgtcagcaaatctgccaccttatctccttgactcacagtacgttgtgtctcacaatacgttacagcaattcactctacctgtccgaaccgacggcagcgccctgcaccgccctttttcggctacccgcatagcgggaggacggaatacttgctctattgaaaatcaattcgccgtcctttcatgtccagctcattgttgcgaggctaaacgtcaaagcccgtctgtcacatctcgtgccaggcgtctaggggggggtatcgtatccctctagcatcgcgcaaaggagagtcaaatgagcaagcagttcagaacaacaatttccgcgttagcggcaatcatctgctcggtagttctgtcatcctgcggagtagtgccaggacaacagaacgcggagtcggcgaatgtcttcgataccagtactccacagaagaccgtggaaggttttctccgtgcactaggcaatggcgatcaagctacggctctcaagtacgtcacgccttcggcccggccggaggatgatttcattcctgaccagctcatcaaaaaagcatctaatcgaatcagtgaaatcaatgtcggagaggccgaaaattccaaggcgcacggcacgatggttagctattcgtataaggccgatggccgcactgttaaaggtaaagctgccgtaaagtcatctccggatggaggataccgactccgtaatgatcccgacaatgattccgatgaccgtcctatcacgagtatcgacgacttcatgccacctattggtttttcatctaaagcattgaacgtcgaagaaaccgcccggattctgccaggaacatacgatctgagtctggaaccatcatggggcacccttgaaatgaccgtccatgccaatggagctcatgagcccggaaatacagtgacaaccgaatatgggaaaatgaagatttccaataagtccaatctcatagaacgattgagaagaaacatgatcgaaaacttggaggattggaacgaaacgaagaatgatagtgattccaccttccgagccgatcaaatgacttgggaagttaccagcattcagcaagttcctcatgactactcgctgcttgccttcgatgcaaagggtagtttcccctacacgttcttgaccttccaaagaacaaaaaacaacacgatgtctttcggaggacccgaagatcttcaaggacatttcatcatcggcgttgacgagctcacagatatttcaggtgccgaaagcaccacgtccacggtatctttcacccaacacgatatcgattcaatcactatcgacaataggagcgaggttatcttcgcatacccccaagagatagagaacggatactccttctaatcgaatgaaacttgccctgggatgaggcaacgctcaacagtcacttcatcattgcgacataccccgtcaaggtcacatcatgaaatgagatcgcggctctcccagcaatgtatgaatgagaccctgtgcagccaatgtcctgaaataacaaactatatttctatttcaggacatttttaagttagagacacaatcatattatctgcgatagtaatcagctcagccgccgcagcagccaggacgacacgaaggcggatgccgccacggccaggccgaccggcacgaagaactcgatcggagcctcggtgagttccatgaccaggcacatggccatgagcggagcctgctgggatgcggagagcagcgcggcggccccgatcagggcgcacgcggtgaccgaatctacggggaagacgaacagccagagcagtccgagcatcgtacccagcgtggatcccaaggcgatgccgggctgaagcacgccgcccgatgcgccggagcggatggtcatcagagtgacgaacgccttggccacgaaggtgagcgccagcacgcccagcaacatccatagccggttcagttcaagcggagtcccggcgttgacgaccgagcccggagcgccgtccgagccggcgaggaacgtccatggcgaggccgctgcggacgcggccgattgtgccgcaccggaggtggcggccgtttcggggatgaatgtgctgaagccgagctgcgccgcggcacgcccgttgcccatgacctgcggcacgacgatagagaccagaccggtcaccaatccggcgatcggcatctgccacatcagcgaccgtccggtgggcttgtgcgattcggcccactgcgagcccttgcggaacagtgcgccgacgacgccgcacgccgttccgcacagcagcgcgaacagcatcaggctcggcgtgctgttcatctgcatcgcgccgatgtcgtagaacatgtgctcgcctttgatggcggtcgcgacgaacgccgcagtcgcagacatccccaatccgaatgcgaccttctccaacgtcacgtcgacgagcagtatctccaccgcgaagaacatgccggccagcggcgcgttgtacacgcctcccagaccggcaccggcggcgacggcgacgaccatgcggcgatcgagcacgccatgcgcgtcgccttcgccgccaccgatatggaagatgtcgcagaaccgctgcgccagcatggcgcccagctcgcgcggcgcgacctcgcgcccgatggaggcgccggagccgacgatgaatatctgcagcaccacatgcacgatggtctgccagaacggcatgcggcccccgttcaccgccttcttgacggacggcaccttctcggtcttcgtgcgcagcaggtaccatatgacgccggcgacgcccagtcccaacgtgacggaggcgatgcggcggaccgccggcacggtgaacgcgccgggaatgaactcgctttcgatgaatccgagcatcacgtattcgacaccgtacagcagcagcgtcagcaggccggcgcatgcgccgatgatcgcgccgagcaccagcgtggccgcggtcagccagccgatgcgcttccagtcggtcttctccatgatgcacctcttcgatggcgagtggaacgtccgggaacgggagacccgcccatgtcagcctacccgcggcatcctacacccgctcctcaccgcgcatatcccaccgtatatacgacttgacccggaacctttgcggttccgggtcaagtcagtcattctgcatcacgggcacggcgcgatagcagcgatgccgcgcgatttacgctcactcggcgtcggcggtgttctcgtcgtccttcttggcgagctcgtcggcgacggcggccgcggcggaggcggcttcgacgctctcggactcttcgtcctcagcggcctcgccgaggaaggagctcaggtcgagggtctcgccttcggacttgaaggtgacggcgcgcatgccggcgagcaggcccttggagcggccgacttcctgcacggcggagccgagctggccgttcttgacgatggcctggatgaacgcggacgggtccatgccgtactgctgggcgatggaggcgaggaagttggtgacatcggcctgggagaccttgacgtccagcttctcggccagggcgtcgagcaccatctggtcggtgagctccttgacgacctgcttctcggcgtcggccttctgctcgtcggtggccttggacggatcggcggtcacgttcttgagctgctgctcaagcatgtcggccttgacgcccttcggcaccgggatctcagcgccttcctcaagcttggcgatgaaggcgtcgcgggcctcggtggcctgacggccttcggcgtcgcgctcggcggccttgcgcacgtcggccttgagctcatccagcgtatcgaactcagaggcatcctgggcgaagtcgtcgtcgagctccggcaactcctcggtcttcacggagttgaccttgaccttgacgagcgcctcttcgccttcgtgctcgccgccctgcagcttgctgttgaaagaggtctcctcgccggcggacaggccttcgagggcctcgtccagaccgtccagcatggtgccggagccgagctcgtagctcacgccttcctgggagtcgacggactcgccgtcgatctgggcgtcgaggtcgatgttcgcgaagtcgcccttggcagccggacggtcgacgccgaccagggtgccgaagcgctggcgcagggattcgaggcggttgttcacgtcctcatcggtgacctgggccttgggcacgtcgatctccaggccgtcgagttccggcagctcgatgtcgggacgacgctcgacggtcgcggtgaacttcagcttggtctcgtccttggcggattcgggcacttcctgcacgtcgatctccggctgggacatcggatggatcttcttctcctcaagcgccttggaatagagctccggcacgccgttgttgacggcctcgccagcgacggctgcgaagccgatgcgctggtcgatgatcttgccggggacgtggcccttgcggaagccggggatgttcacctgcttggcgatctccttgcgggcggcatccagatacgggttgaactcctccgggtcgacggtgatggtgagcttgaccttggtgggttcgagattcctaacgctgattttcacgcttgcgctcctgaaagtcgtttattctacttcatctgccggtaggcaacctctacatgataacgcgacttacggacgctgcgatgagattcacctgccagtcacgggcgccctgcgatttgaggaattccgcgacatcgcgcttgcgcggttcgtcggtccagcacaggttgcgcaggatctgcggcttgacgatgatttcggcgggggtgcgggtgtcgtcggcgatctgggagacgactttgcgcacgtcttgcagcagccgcatacgctgagggtgcctggtggcccagagcttcatcgagcgaggtgcgttcgcatgctcctcgtcggccacgggcaccggcatcaccggccattgcgacggcggcagctccagcgcgcgccgaatcgtctctcgccataccgagggcttgaccttgcgctgaatcggcgcgtaccgttcgaacatcttgtcctgctcgccgccggtgcgcatgcgcacgcgctcgttgagcgacctgatcatcctgaattcgcgggcgttgcggggctttcgcgacgcggcctcgactatcgaatcgtcggagagcagcagtccgggcgcgatgtcataggcgcgggcgagctcgtctcgcttctcccacagcgccttggccacggcgaggccctggtggtcctggctgacggtgttgatgtgcgatatgcgcagccagggcaccggatgctcccgtctgggtcccatgccggtctgcagcgcataccggaactcctcatcggcccatccgtccttgccctgcaccttcagctcgcgctgcatcttccggcgcagctcaatcagcagttcgacgtccaatgcggcgtaattgcgccagtccctcggcagcggccgatatgaccagtcagcggcggaatgctccttggcgagcgtgacgcccagataatgctcggtgaccgcggcgagaccgaaccggtgcaaccccagcatcctcgcggcgatctcggtgtcgaacagggtctgcggcgtcaggccgatgtcggcgaatccgggcaggtcctgcaacgagtcgtgtaatatccacacggcatcgccgaccgcgtcgttgaacatgccccagtcggcaccggcgcgggtcagggcgacggggtcgagcagcactatgccggcgccttcgcgcttgaactgcaccagccagtcctcatggccgtaccggaatccggaggcgcgttccgcgtcggcggccaacggcccggccgccccggccagacggtcgcatacctcccgaaatccttcaagtgtgtcggtcacatccggaacaccacctcgcggctgcgtctgcagcctcggctcatcggtcaactgacggctcctcctcgcattcgctggcggactgcacgaatcgcgcccagcactgcacctggccgcccgcgtccaaaccgccatccatgctagcaaggggtgtccatgagacacgcatctcgcagccggcggttccttcctgagcgagtccgaacgacgtgttctgcgtgacggtgaccgtacccgacacgtcacctaaggaggcgtcatccacgaacgagcacatcccgtcccagtacatgctcggggcgaggccatcgttctcgtcggacggcaacggcagctgcgcgtaggcgacgcaacgccaatgggagtgccagtcctcgcgttcgcgctcgacgtacagcagcatgatccagcccgaggccatgtgggcgtcgccgaacgaacgggagtcgtcatccgcgacgcattccatttccacgccgatgccgtagtcggccagcgtcgagggcacgggaagctcacggtagcgcatgcccgtcacccgcggcatggaacgcaccgattccaccgccgaccagaccgcgtccggcacgccgaccgggcgttcaggcatgtcggcgtccgggtgccgcatcgttgcggagcccctcggaaacgcgaagatttcagccatatatacaggctacggtgtcgtcgaagattttacggtatttccacacacaagattgtgtaggttttcgagtccgacaccgcagagaacggttccctatcagtacacgacgaatccgtgcgactggaattgctccgtcacgcgcttcttcaacgcggcggacgggcccttctgatgctcaagaggatacgggatgcgcagctcatgccacttcgggcgcccgagctggtggaatcccagcacgtcgatgtgttcgacggccccgtcgaagctctcgcagatcctggccacgttctcgatgttctcctccgagtcggtcaaccccggcacgagcacgaaccgcacccagatcttcttgccggccttcgccagccgccgtccgaagtcgatggtgggctgcagcagccccccggtgaccttgtggtaggtctcctcgtcgcccgacttgacgtcgagcaggcacaggtcgatgtcgtcgatcatctcgtcggtgtagttggtgttgaggaagccggatgtgtcgaggcaggtgtgcacgcccatctccttggccgcgtggaacacgcgcgagacgaacgccggctgcatcatcgactcgccgccggagaacgtgatgccgccatgcgtggccttgaacaggtccttgtaccggtcaaccttcttgatcatggcgtcgaggtatacgggctgcccgtcgcgcatcttccatgtgtcggggttctggcagtactggcagcgcagggggcatccggacatgaagacggtcatgcgcgtgcccgggccatcgaccgacgtgttgatgtcccacgagtggacgaagccgatgtcgccgcttttgagcgcgtggatgcggtcgcgcctatcgaggccgatgggcgattcgaagccggaaagccctcccatcagggtctgcgaggcgtattccttcgacgctttgagcatatgcggccgtgtggtgcggaattgcgcgatatcagacatcatcgtcctccttgaaagtacttcctgtattccatactacaaacgttttgcgcggcgtccgcccgctatggacttcatgtcgtgtgaggatcgtcacgcggattcccaagcgcgccgtcctgcccgaccatatgagaaggggacgaagccggtcggcctcgcccccttcatcgtctggtcgtcaccgtctgtcagtcggtgaccgaaccctggtggaaggtacgggagatcacgtcgagctgctgctccttggtgagcttgacgaagttcaccgcgtagccggagacgcgcacggtcaggtgcgggtacttctccgggtgctcgacggcgtcctcaagctgctccttgcgcaggacgttgatgttcgcgtggtacaggccgtggccgttgccggcgtccaggatgccgaccaggttgccgatgcgctcatcctcgtcgcggcccaggccgtcgggggtgatcgtgttggtcagcgagatgccgtccagcgcgtcgttgtagtcgatcttgccgaccgagaacatcgacggcagcatgccgtgcgagtccatgccgttctccgggttggcgcccggcgcgtacggcgtgcccttcttgtggcgggacgggaaggaaccggtgttcttgccgtactccacgttggaggtgatggtcaggatggactgcgtcgggacggcgccgcggtacacaggcaggcgcttgacctgacccatgacggtggagacgacccacttggcgatgtcgtcggcgcggtcgtcgtcgttgccgtagatcgggaagtcgccttcggtgcggtaaccgacgatcaggtcgtcatcggcgccctcgacgtactcgtactcgtggccttcaaggttcttcgcgtccttgttgtagatcgggtagaccttggcgtacttgacggcggacagggagtcggcggcgatggacaggccggacatgccgcaaccgagggtgcggtacacctccttgtcgtgcagcgccatctcgatggactcgtaggcgtacttatcgtgcatgtagtggatgatgttcagagccttgacatacacttcagacagccagttcagggccttctcgtagttgttcttgaccttctcgtagtcgagcgtgccgtcggcctcgggagcgatgggctcgatgatgcccttgtcgatgacctgcatgccggtcatctcgtcacggccgccgttgatcgcgtacagcagggccttggcggagttcacgcgggccgcgaagaactgcatctgcttgccgacgcgcatcggggacacgcagcaggcgatggccgcgtcgtcgccccagtggttgcggatctccttgtcggactcgtactggatggccgaggtgtcgatcgagatcttggcgcagaagcgcttgtagccttccggcagcttcgggtcccagaagattgtgatgttcggctcggggccgggtccgaggtgctccagcgtcagcgtgttgagcaggcggaaggaggtcttggttaccatcggacggccgtcgtcgccgaagccggcgtcggaccatgtcgcccagtacgggtcgccggagaagatcgcgtcgtagtccttggtgcgcaggaagcgcacgatgcgcagcttcatgacgatgttgtcgatgatctcctgggcgtcggtctcggtgatcttgccggactgcaggtcacgctcgaagtagcagtcgaagaacgcggagttgcggccgaaggacatggcggcgccgtcctggctcttgacggaggcgaggtagcccatgtaggtccactgcacggcctcctgcgcggtctgcgccgggcgggtcaggtccagaccgtactcgttgccgaggttgatgagctgcttgagggccttgatctgctcgtcgtgctcctcgcggaagcggatccagtgctcgatctccggctcggtgaagtcgttgcggtacggcacggaatccttgtcgcgctgcttgaacttgatcagcgcggcgacgccgtacagggccacgcggcggtagtcgccgatgatgcggccgcggccgtaggcgtccggcagaccggtgaggattttgttgtggcgggcgatcttgatgtccttggtgtagacgccgaagacgccgtcgttgtgggtcttgcggtacttggtgaagatcttcttgatctccgggtccggctccttgccggcctccttgatggcctgctcgaccatgcgccagccgccgttcggcatcatcgcacgcttgcaggggacgtcggtctgcaggccgacaacgacgttgtcgacctcgggggactcgatgtaaccggccgggaaggcgtcgatgccggccgggatgtgggtgtcgacatcgtagacgcgctgcttgcgctcgaccgccaggtagttgtcgtcgaggtacttccacaggtgcttggtcttgtcggtcgcgtcggccaggaaggactcgtcaccggtgtacggggtgtagttcttctggatgaagtcgcgaacgtcgatgtccttctgccagtcgccttcgacgaagccgtcccaggccttggcctgaagctcttcggcagtaagagcggtcgcatcaactgctgtcatattcactccttgtgtcgtgcaacgcatcttcacgttgttgtcaagaaatgattctactagccggtcgatgtgagctggctgagagatggcgtgacttatctcacattcacgccgtgtcgtcagtcgtcgaagccgtcgaagccgtcgccgcggccgcccgagggcgtgttctcgccccatttgcgccacttgcgattggcttccgcccacagcgcattgcgctccttgacgatcttccacgcctcaagggcatcctcgcgggtcttgtacggccccatgcggtgggagctcggcgagagcatgcccaactcgggctgctcggtcttcgtgttgaaataccactgcttgtcggtcatggcgtcctccccgcacccatggtagcgcgccgcggcgcccggcaccgcgcctatgcggcggccgggcgagcgctcccctactcacggaacgcgttggtgacgggcagacgccggtcgcggccgaacgcgagcgcggtgaccttcggcccgagcggatactggcggcgcttccactccgcgcggtccaccagtcgcatcaccgtgtcgacggtcttctcgtcgaagccgtcggccagcaggtcggcgcgaccgtgcgcatgctcgatgtatgcggcgagcaccttgtcgagcagttcatattcgggcagcgaatcggaatccttctgccccgggcgcagctcggcgctcggcgccttctcgatgctgctgaccggaatcatcacgccgccgggcagcggcgttccggcatcgccgttctcattgccgacgatgcgcagcccgccgatgccgacgcctgcggcagcggcccggttgcgccagcgggacagttcccagacacgggtcttgagcaggtccttgatcggcgcgtatccgccgacggcgtcgccgtagatggtcgaatagccgcacgccagctcggacttgttgcccgtggcgacggcgagcagaccgaggctgttggagtacgccatgacgatgacgccgcggatgcgggcctgcaggttctccgcggccacgccttcgagcttgagctggccctggtacacattgaacatgggctcgatcggctgcacgtcgtaatgtgcgccgatgttggccgccaggtcggcggcgtcgtccttggaaccgatggaggaatacatgctcggcatcgagatgccatgcacattgtgtccgccgcaggcgtcggcggccatcgccgccaccagcgcggagtcgatgccgccggacaggcccaggcacacgccggagaaccggttcttcgccatgtagtccttcaggcccagcacgcaggcggtgtacacctcctcgtccgggtcgggaaggtccgcgatgtcgcccgtcgtctgatgctcggcgtccgtgtcgaggtcgaagagtcccagatgctccatgaacatcggggaacgttccagcagcgtgccgtcgcggtcgacaacgaagctgccgccgtcgaacaccaggtcatcttgaccgccgacctggttcacgtagatcatcggggcgccgacctcggccgcacgcctgaccgcgaggtcgtaacgcgtatgggtcttgccctcctcgtacggcgagccgttcatcgtcatcagcacgtcgatatgctcgtcggcgagccgggcgaccggcccgccgtcctgccagatgtcctcgcagatcgccacgccgatgcgcacgccgtcgatgtcgagcacgacggtgcggtcgccggccgcgaagatgcggaactcgtcgaacacgccgtagttcggcaggaaatgcttgtcgtagccggcccagaccatgccgtcgtgcagcacgaccatgcggttgcgaggtttgtcggacgcgtggtcggtgccgaccgtgccgacggcgacatacaggtcgcccaatccgtcggcctccagctcggtcgccagccagttcgccttgtcccacgccgccttgcggaacgtgcggcgcaacgccagatcctcgatggggtatccggtcagcgtcatttccgggaagatgacgacgtgggcgccttcatgcgcggcgagatgcgcgtagtgcatgattttgtcggcgttgccgtcgaggtcgccgacgcaggtgtcgatctgggcaagggcaaaacgaagatgggtcatagtgtcctatagtacccagccgagatgacggacgacaggggcggcacatgccgtcacgcgggatgatccgtcccaccgcccgtcagcgaagctcggcgagcacccgcagcgaggcgttgacgtagaagtcaacggcgggcccgatcgcgccgtccacgccgacgaagtgcggactgtgccagtcggcgcaccctggttccccgttcgagccgatgaacgcgaacaccagacgggccccgcatcccgagaactccacgaaatcctcccccgccatgctgggatgtatcggcttgagcgccgcgtaggagggcacgtcggccgcgaccgcctcggacagctcctcgtcgccgaccagcggcacctggatgcagtcccagtccacgtcggccgcgatcccgtacgcttcggccgtgtgctcgacctccgccacgaaacgccggtggaccagccgttcgtcgtcctggtcgaagaagcgcacggtgccctggaatcccgcttcggcgggcacgacgttccacacgtgcccgccatgcacttcggtgatggacagcaccacggcgtggaacggcgagatgttgcggctcacgatggtctgcagggcgaggatcatcgaggcgagcgcctcgatggggccggtgcccttctgcgggtacccggcatgggtgccctgggcgtgcagcgtgaccttgaacttcacgcagccggccatcatcggctgagggccgatggcgatctgtccgggggcgtagttcgggttgttatgcgtgccgatgatggccttcacgtcatccgtcgcgtcggattccacgaccgtgcgggcgcccaggcccacctcctcggccggctggaaaacgatcttcacgctgcctgcgatgcggtcgcggtgatcggccagccagaacgccgcgcccaaaagcccggtcatgtgcaggtcatggccgcagccgtgcatcacgccggggttcagcgagctgaacggcaggccggtgtcctcggtgatcggcaggccgtcgatgtcggcacgcagcgcgatgcgcggtcccggcacctctccctcgatgagcgcgacgacgccggtctccaacgtcgtgtcgagcacgtctatgccatgcccgcgcagcagacgggccagatacgcgctggtctcgacctccttgaagctgcgttcgggatgctgatgcagataatgccgtatgccgatcagctcgtccgtgaccccgacatgttcgaccatgatttacgttccttccccgcgagatgtcatgccatgttacctctgtagcttcaatatacgcttggcgatggcgttcgcgatgccctgcacgatctggaccagcacgatcatgatgatcacggccgtccaggtcaccgtctggtcgactttctgataaccgtccagtcggtctggtggccggcgatgtcgtacgcatgggaccagggactcatcgcgtctcctccttgtctgccgcggacggctgcggcgatggcgtcctcgtagcctatggggtccgccgccgtgccgaagtcgatgacatcgctggaacgtgacagctcccccgagaaagtcgcgcaccagcgcatcgtcgcccgagaactcgtaggtgatcgagccgatggccgaaccggataccgtgtcgatgaaccgcttggtcaccgcctgctggggtgccgcgaacacgttgcacacatctccgcgctccacgacccggccggcgctcatcacggcgaccacgatgagtgcgatgacgatgttgcgcacggtatggttgacgcgcaccggctcattgtcgggagagcccgcctgttgtgttgctgctgtcatgttcgttcccactctgattggttgacaacgcccaccatacggcagcgacggcggcagtctcggggcgggtctgataacgcgttacgggatgccatccagtgctgttcatacactggggatgaccgaatttcgtatcgcggaggttgcgtacatggcatcggacgacatcatgacagcgggcgccggaggcgcgacggccaccgtgcgcgccgacatcaaggcggcgttcttcgacatcgacggcacgctgacgagtttcgtgacgcatgtgatcccgcagtcctccatcgacgcgctgcacgagctgcaggatcgcggggtgaaggtgttcatctgctccggtcgggcaccgtcgcacatgaccgtcgtgctcgacatgatgccggtgcacttcgacggcatcatcgcgctgaacgggcagtactgcttcgacgaccacgggctcctggagaaggagtcgctgctgcccgaggacatcgtcaccatcacccgctggcttgacgagcaccccgacgtggtggcgaactactgcgaaaaggattacgtctacttcaaccagatcaccgacgcgatgcgggccacgtggcgccaactcggcaagaccgcaccgaccgtgaacatcgacgatccgcacgagagggcgctgaagtatgagacgttccagatcagcccgtacatcagctttgaagatgaagcgaagctgtccgccatgtgtcgcaatgtcagaggcgtgcgctggcatccggacttcaccgacctgattcccgccgacggcggcaaacccgagggaatgaagcggttcatgcggcattacggctggacgcgcgagcagaccatcgcgttcggagacggcggcaacgacgccgacatgctcgccttcgccggcatcggcgtggcgatgggcaatgcgaccgaaccggcgaaggccgcggccgactacatcaccgatgacgtcgaccacgacggcatcatgaacgcgctcaagcacttcaacgtcctgtagctccctcccctcccgctggcgggaggtggcgcgcagcgccggagggtggtaacagacccggcacgcatacgaagagccctgacccgacgagggttcagggctcttccatgtgtatcggagtgtcggcttcgaattgccgccgcgcttacttcaccacttcgatggacatgatgccggcaggttcgagcggcgcgtcggaacggtcggtcggcacggcctcaagcttgtcgaccacggccttggactcgtcgtcggcgacctcgccgaagatcgtgtggtgtccgtcgagccacggggtcggcacggtggtgatgaagaactgggagccgttggtgccatgcgccttgccgtcgcggccgcgacgcaggccggcattcgccatggccagcagatacggccggtcgaacatgagttcggggacgatctcgtcgtcgaagtcgtagccggggccaccggtgccattgcccagcgggcagccgccctggatcatgaagtccttgatgatgcggtggaaggtcaggccgttgtagaacggctcatgggacggctggccggtgaacgggtccgtccattccttctcgccggtcgccagaccgaggaagttcttcacggtcacgggcgtctgatcgtcgaacaggttgatggtgatgtcaccttcggaggtgcgcatgatgatggtagtcatggtcccaagtgtctcatgggcttgagaccgggcggtgatgccaatcaagcggaatgtatgcgagcggcttgtgatgtgtgtctatattgcatataattatcataattattatgtaacctattgaggggatgggaggctgctatggctgtgaaggaacggacgaccattgcattggatccggaggtcaagcgcgaggcgacggacgtgcttgagcggatgggtttgagcttgagctcgttcacggagatctgcctgcggcaggcggtccgtgacaagggcatgccgttcacgccgagtctgaggccggtccgatccgacgggtatccggttcctccggctcacgacgcgtatcgtttcgagcgttcgaaaagcacgggcaatatcgtgctgcctcaggagtgggacgatccggcggatgacatctacgatcatgcgtgagccggaagtgtacgacgtgtggctgatgcgcgtcgagttccccgatcatcccggcgtgggcaaggtcagacccgtcatcgtcaccagggtcgaggaggatcggatctcgggcatcgtcgtcaaggtgaccagcgtgacgacatggaacggtccgggtgacgttccgttgcttgactggcgtcacgagggtctgtacaagccatccgtggcgagatgctcgtagcgtttctggttcggcaatggtgacttgctgaagtatttcggcaggctgtcgttgcgtgacgcgaacgaccttgatgccggtcttgatgctacgggcgacgtcccgccccaccgccagtcgcattcatgatgatggcggggccaacggtttttctccctggatattatctgcatgtcgatgtttgtgttcgatgaacgaaatggattgttggttgtcggcgtattctgcgcaacgcgttttccgacggtgtcgtcacgggcgtgatgccgcgcaatgcgaggatggtgggtgattttggggactggcgaagatgccgggctccggcggggacggtggagtgctcccggattattttcgggtgcctgtaggcgcctcgtggagaacgaggctgatcggtaggtttcccgaaatcggaaaaccttggaatagagccgaaaacgaccacgtgcgattatcatgcgaggtgcgcatgatgatggtagtcatggtcccaagtgtctcatgggcttgagaccgggcattgctgtttgattgcggggaatggcgcacgggcccgtggactggccacggccggtagccgggccgccgagctgcaacgcggaacgtcatacgaattggttcactatgatcagcgcaccggcagcgacagccatgagcggctcctgctctgtattttgatgctcctatacattgtcaagcgtttggacccgttgtttgagttcgggcaggttccgtgctccgcgttcgacttcgttgatgcggcttgacggcacgtacagcgcctcgccgacctgctgttgaagaaggagctcgtgtaaccggaaccgctacaccacgatcgagcgactgaggcgcgacctcaacgactacgtgtggtaattcgacgaccagcggctccgttccatcctcggataccggagtgcgaaggaattcatcgaacgaggatcgtcctctaaggacctatccaacacgctgttgccaatccgattggcgtcatggagttataatttttctgtgatttaggtatgtaatgtagccctaatcataagttgtgaacgtcttactcgcgtatgttcgtagacactgaaagtcaacggacatacttatcccagttcctacgtgaaccaactcccggggagatcaacatgactcgattccgcaatacatacacaaccctcacaaccttcgtgtcggccgctgttctccttatctcgaccactgtgccggcatccgcatcgcccatggcaagtgatccattgtcttcgtccaccacaacagccgtgcgtgcacaggtaacagcccttggtgcaaatcgtacctacacttacgttccgaccaataacacaagcgtcggcgaccccatcgtcacagcctactggactccagaacgcatgaagagtgccattcccgctgatacaccaacaagcacgaccgaggtaaaccgacagattgacgagctcgaacaaccggctctggcagacgaaccagttactgacggatcgtcccccgtgacggcaatcttgaacgcaatcacgccacaggctgtgacgccagtcacgaatttctcaaagaccaacggaaaagttttcttccgcaatcagaccgacggcaaggattacgtatgctctggagcctccgtcaatagccgttccaaacgtctggtcgttactgctggccactgtgtccatggcggcccaggaaaagattggcataccaattggatattcgcaccgggttacagcaacggtgccacgtatggcacttaccaagctgccacgctccgaacgctcaatgactggatcaactatggtgaatccgggcgaggattcaattcagacgttgcctttgttaccacctatagtggcagcacttccggggatactgttgtaaacgcggttggtggtcacgggtttaggtggggcggaggtactggtttcgacgtcagtattttcggctatccaacgaacctcagcggaggccaaagcatgtgggcctgctggggctctagtcaaactggttggaatggcctttacaagttcaaccatattactggttgcgatttcggcggtggttcgtccggtggaccttggctcgacgaatacagcaataccactggtctcggatatgtacgcagcgtaacctcgaacggccccgcagacaattcctatcttcgaggcccatacttcgacagccgcgtcaacgacttgttcgttgcagcaaacaaggactggtgaaacaacatcatggccagttggattcgcttccgcagccgttttgttgctgcgcttctggtatttgctttgaccagtatcacggtaatgggatgcgcaactaacgggagcgaatccagccccagctcaccaggtacagatgcaggatacgattccgcagcagaggcaccggagcaatcctccaacgacgtacagcaacgaaccgacctcagcaacgaacatatatcctcatggaaccgatacgaagtggtctcggacacctccgtgcgcattttcttctccatgggaaatcccaaatgtcatggtgtacgggccaccgtcgacgaagactcctccgcagtgctaatcaccctctacgaaggaacactccccaacgcgccaaccgaatgcgccgcgatcgcagtcaatgcatcccttctgcttaccacacgcaaccccattggaatccgttccgtcattactggataaaaatagtccagacctttggaactaaacacgtaattccaccggcgtcgccatacacatgcttgagaccggtaaacacaccctagttagccttaccgtggacatggtaaagaaatacgagttggagaaataccgaatccggccctcggaaaggatgcgggagatgctcgaacactatctcgtcgaacacaggcgcgccgtcgcggccatcgtggaacggcacgggggagagagacgggccacgctttcgttctcacgcgtctccgacctgcccgacgacctgcccgactggatcagggccgaggagtccgcgaaacggcacgccgccgccgtacgcgaggcagccgcccctatgttcgattcgtgcctgtagaatttattttctgaaacgccgagtcagaaaggaacggaagcatgccgcgcaagctgatcatgtgcggggaccatccggtcctcgtgttcgaatacgaacctgcgtccggccgcgcgtgctcctcgggcgaggtccttgattccaggcgggtgcccctggagttcaccacgcacggcaagagcgcgctgtatgccaagaggatcgacgaatggtggaggtcccgcgccatcccctccacccgtgacggaattcgccgtgtgctcgaatcgcttggtgcgtcatcgaccggggagctgctcgacaggacctacgggctgagcctgtcggaccagtactgggtcaaacgtgaggacgatccggtcgaatggaaggacatcaacttcttcgacaatcccttcgacgaggcgctgggcgagatcctgctcacctcgtactcgtcatcccatgacatcagcctcaacgctcccgacgtctccacgggcggcgatcttcccaaacgctggacgatcgacagaaacaccggcaggaggctgctcgtcaagtcgggccgtaccggccaggagccgatgaacgaggtcatcgcctcgaagctctgcgcgtggctgggtattcccgccgtcccatattcgctggcgcgcagcggcaaccgtctggtctgcacgtgcgaggatatgctcaccagccatgaggaactggtctccgcctggcaggtgctccaatccgccagaaccatcaatggactcaattcgcatgaccagtggatccatgccgccgccggcttcggagctgacgagcgtgccgtgtgcggcgccacggacgactggctcgtggtcgattacctcatgcgtaacactgaccggcactacagcaacttcggtctgatccgtgacatcgagacctttgcggtccgcccggccccgatctacgacacgggagcgagcctgtggagcggcgagctcgatgtggacggtcgggattggtttgccaagccgttctacaccgcgaccggcaagccctcggctttgcggcagctcagactggtggaggactggagccggttcgacctggacgccctgtcggactggccggacgaggtggcgcacgaattgtcgcgcatgcgcatgttcgcgcccgaacgtctcgacgccatccgggaccagcttgtcaagcgcatcggaacgatgcgcaggatcagggagggcaagtcccttcgcgcgtccggtccgatccgaaacagggcggatctgctggacagattcggcaaaacattgcagaaaaaccttgcccgacaagacgggggtggcagggacgccgggattgatcgcaaaggtcctgggtgccgtatgggtcattaggccgaaggccctgggccacgaaatgagaatcagcgagagctaaggattgagcgtatggcatacgaaaacgaaagattcaaagaacaccatgaggtgagattgcctttgctacgggagcttctccgaaagggatgggaccgtgaccagattatctgcccttcaccagatagtgacgaccgtgaatggcgtgtacccaagaccccatcggagaacgctttgcgggaagcgggccggagtttcaatggctatccggtggacatggcgatttttgattctcctcgtcatcgcggcgaatgggatcatgttatcgcattggtcgagacgaaagcgccgaaccacaaggaaggcatatcggaactatcgacatatctgggccttgaacccaatgcggtgctcggcatctggtccgatggagacagcatatcccttgtgtacaagcaggccgatatgcattacaagtcggtaagacaagcaacgttgccggcgccgggagataacgtcctgatccccggagacaaggcgctcacctacgtggatttaagggaacatgacgacatcagcggaacgggactcaaccgtttattctccgaccttttaaaccatatcgtcgccaatgactcgaaatccactcgcgccgacgaccggttggacaacatgtgcaacatgctgctgctgaaaatggattcggacaccaacggcaaaatggctcaagaccccaaagagcctcttgacttccaggtttgcccgacaccggtggaaaccgcgaaaagaatcaatacgaactttgaaaggtacatggcgaaataccctttcctcttcgaagacacatcaacgaaaaccatcaaattcgatgatgagacgattcatgccatcgtctactggcttcaaggcatcaatttgaagtccgcagcgccggagaccctgtccacggcgtttcaagtgttccgttcggcgaatgtcaaacaaggcgaagggcaatatttcacgccccagcgcatcattgaatctgccgtcaaattaatggagatcgactaccacgataaagtcatagacccagcttgtggtaccggcggattcctgtttgagacttatagcactctgttgaaacgcgcatccggcgaacagcgcgacgaaatcagaacatgggctcatcgtaatctttacggtgttgacttggattccatcaatgtcaaactagctcgcgcgctgatgattggtgcgaaggacggatctaccaatattgttcttggcgattcgcttcgggaacagaagtggcaggatttccccatgctgacgcccgtcttggggcgtgaaactgacggttcctacgatgtcgttctcacgaatccaccgtttggcgagagactgaagattcgtgcgactgacgcgaaacaggcgaaatacagtatctgtcagcataccagcggcggatatcccagcgacaaatactccgataccgaacttggcctcgtgttcatggagcgtgcgtacagattgctcgcgggcggaggacgtttaggcatagtcctgccggagacgtatttcttctccagctcatatcaatggttccgtaaatgggttagccggcatttcgatgtgttggcagtgatgaacatccctatggaggcatttcagggtttctgccgcgccaagacgaacttttatgtcatgcgcaagaaatccacgaagggagctgcgtccatgaaaccgccatcatgggctcagccgggtaagacgtggatcacttatgctccgactatcggcatcaacaaggacggcaagacgctttaccgtgtcactaaggaaggcacgcggactcgtgaggtcgacgatacggtgctttcggacgtgacggcacttcttgaagggtcgaattcttccacatcatgttttgtcaccacgccggaatctcttgtcaattcctatcttggcgtgccccagtattacgaccggatcagcgttaaggaattcgagcggtatgtccaaacacatttgcaaggttttacggcaagaacgcttggagatcttgaagatgctggcatcatttccatcaggaatgggcatggcagtccctccgcggacttgaggaatggtgatattccctacgtgaaggtatcggatttgcgtgcgggcatggtcaacttcaaccccacgaacatggtttctttgtcggtcgcggaacggttctggcgtggaagcgacagcggactttccccctggagcattgtcacaccttctcgcgcatcgaagaacataggagaaccatccatgctgctgccgggtcaggagcgggcggtgtttaccaaggaaacactcattatgaatgcgacggccgaagcactgtttgataacttctatctcggatgggcgttggacctcgacgtggttcgtaagcagtggggcagagtcgtgttcatgcagacaaaccgtgaggatcttggtaacagataccgagagattttgattccaattcccgacaccagggaacatggcgaatcagtgtcgaaccattaccgtcaatactatcgctccattgcacagtcccgggcgaagttcttgaaagcgcgagaatcccagaacagatgatgctctgaaggcattgactgctgtcagccgcgcgagcattcttggctttcgcgaccattcagtgaccgtcatgaggggatgagcggctggagcacatcttcgaccatctcttcggcaagggtcgtgccctcatggattccggggactgaaatcgatttcgttatttcggtttttcggtatgtagttctttcgttatttcggtttttaggtaaaacggtttcccggttttcaccggttccggtattttggcatgcgtcatacttccggcttcgtcggggattcggctcgcgccaggcgttggcctgtgatagtggcggcgcggatgacggcgagccgctcagtctgtggcttcaaccgttatatcccctgcggcgttaatttcttcttcggtcggttcggacatgtcgagtgtttcattcttgatgaacatgcgtatggcgtttcttgatatgacaatggtcgaggcgatatcgacgcctccgccgatcaggccgccggcgatgggtaccagcttgccgaggttgatcacgcccttttctccgaatttggtgaggaaacggaagcccattttttgattgattttcgtgagcacggctccgggaattttcttgattgccgcggtgagggacttctcgccgatctgaatgccggtctctttgacgatatcggcgatcgtcgttccggtgaggcacatgtacaccagtgtctgcacctggtccgagttcacatcgtatccacccatcttcgcgatggccgctatcatccgcatctgcacgtacatgacgctgccgatgttcgctggaatggtggcggggagggtgacgatgccgcctagcccgctgaggaatcccgacatgccgcatttggcgacctgccatcgagtcaggcttcgcgcggcggcttccggcgtgtcgtgatgggataggtagtcgtcggcgatttcatctaccgaacggctcaccatggggatgccgttcaaggttttttcatagaccgcgtcaagaatctttcccgctttggcttcactgagcggttcttcctgctcctgtgcctcaaccattattgctcccttttctgcttctgggccaagtctgctctcggtgtggaaacactatgtcttctataatcagtgttgtcggcgacaatggtgccgctttaagggaaaaggatgagagttatggataacggacatgcaggttacatgggcgcggtcagatgggtgagcttcagccatcacggcgatcccgagtcgggcgaggtccggaccatggacgacgggagcgtgtgggcgcgtatctccgacctggatccgcggggtgatgacgaccggtgggtgctgctgctggatccggccggcgtcgaagcgcccggcgtgagcgaggtgcggttccatgacgtgaccgtgagcgtgaccgccggggacgcgctgccgcttcccgacgatgtgagggcgaggttcgccagaaccgacttcatcctagacatgtacgagagtgggggtgtacgaccgggaggaggccggggagaaactgttcgaccatctcttcggcaaggggcgcgatgcggctgattccgaagactgaaccgatttcggtatattgtttttcggtatttaccggttctggtatcgcggcatccaatcggttgagggcattgccttgcgcttcgaccggtggtgtctcacgtgtctaagtgttgccgctgtacctgttgcaacacttagacgtgtgcgggcttgttccgtttgataccggtcttcaccggttctggtttcccaatatttcggtttttcggttttgcgggtatgcctatccggcctggtttcgttctcttccgtcgtcttcgagctcctccagtcttctccggagtccggcgacggtctgccgcagctggtcgatttcctcctccttctgggctatctgcgccttgatgacggccggctcctcggcggggaggtattcgagcgccagacgttcggcgacgtcgcgacgatgttcatgatccagggccgaacgccgcgccatgaaacgagccgccgcgcagatctacgacagggacgatgtacatgccggtatcggaagaggtggctatggcccttgacgcggaccgggacgaacggcatgacgcctgacacgacatgcgtgaggagcggaatcaggcgcggctctgtctaagggctgtcggttttgctagaatttaaggagaaagggaggcacgatgttcggagcgatatctgaatccgagatgcgccgccgcacggagaacgtcgggctgtcggtgcagtccgtgcggttggaaggcggcgacgtgacgagggccttcatgcgcgatgccggagaatatgcgcggggaacaatcgatggcaccgaacttcttgcccgcacccgtcgccgttacggactggagtgatgatggcgcgtgtcttcgatccctacctgattccgggaacgaacgtgctgcggaaccttgtgggcgccacggacgaggatgcgttggcggctgcggagaacgatctctgctccgcccgcgccgccattctgagagaggatctcccgtctgcggaagggacgctgggacagcttcgccgcatgcaccggttcctcttccgggacgtgtacgactgggcgggggaggtacgaaccatcgacatgggcaagggcgaggggcttcccttccagccattggagctgttcagcataggggttcgctactccgaggaggtgcttcgcgccgacgatcttctcaaaggtctcggccatgacgaattcgtaaagcgtctgagcgtcagctacaacaacttcaacatccttcacccgttccgtgagggcaacggacggacgcaacgcattttctgggagatcatcgcgcgcgaggccggctggcatttcgactggggactcatcgacaaaaggacgaacgatcaagcctcgatcgcggggatgcagcgaaacgacctgcgtcctctcgaggatatgttcagaagaatcgtcaagccgttgtcagaaccgttgaccatgtcgaatgacctggcccatcttggtgaatatgcgcaaccggcgaacacggcatacgacatgtctctcgcgcagcgccgtcacgtgtacgagcattactcctaccaacgcaccgtcgtctccccggggcaaggaaagccggaacgcgggcacaaggcgagatgactttcggatgcgtcggaccaggatccattaccttggtatctggttttcggtattttgttctttcagcattccggtatttcgttttttcggtattcaccgtttccggtatccggccgggtgagggcattggctcgcggccagccgtgggttgcctcgcgcgtctaagtgttgcggcggcagatgccgcaactcttagacgtgcgggcttgttccgtttgatgccggtcttcaccggtttcggtttttcattatttcggtttttcggtatctcggtaaaccggtgtcccggtatttaccggttccggtttcttggtatgtgtcgtcagttcttttcctgtaggatcttcctgagtctgtccacctcgctgcggagcttgtcgatctggcgttccttctgatcgatgaccgtgcggatcacggtcggatctttcgagggcatgtaccggtaagcgaggagttccacggtgtcgcagtggtgttccctgactatgcgctggtagctgtccaccgcgacggtgaggctggtgtgtccgaggtcgtccatcgtctcgcgcatggtcccgccctcgaggacgagcatggtggcgtgcgtggcgcgcaacgagtagaaggtgatgtcgggtcgtccgatcttttcacgggacatgcggaatgttcgtccgatggtcgtgggcgggagcagccagtcgtccagtatggtcgagtggaacagcatggtgtcgggtttgcggtccttgcagaaccggctgatatgggcctcgatgagcggggcgagcggtttcgggatgggcacgacccttttgctgcttttggtcttgggctcgcacagtcggtatttgcccctgtcgtcaaggccgcggttgacggagtgtcggacgtggagttgcaggttctccaggtcgatgtccctgagttgcagtgcgcatacctcgccgaggcgcagtccgcctaccaggagggagagccagagcgcgagccgttggtagtcggggaagagcgtggccagcctgttgatctcgtcggcggtgaccggcggctggtcacgtcgtttggattgcggtttgatgacgcggtaccggcacgggctcgcggggatgagcggcggggtgccgtccgcctgctcggtcgcggcggcgagcatgacccgtttgagcgttcgcgccgcctgctcgaacgtccatgccgtcagctcgtccctggcgttcacgtaccattcgtcgaccatctggcgggtgatgcggtcgagcggtgtgtcgccgaacgtctcgttgagccggcgtagcacgatctcgttgcaccggttggaccggccggatagcttgctgccgtccggtttgcggtatctgtcgaagtagtctttggagtattccctgaatatgggcattgtgtccgcgcctcgctgcgatgggtgaacccattggcggatgcctttgttgtggagcgcgacgagatagtgctcctcgtcgagccacttataggcctccgtctcgtattccagaccgaagttccggccgaccttcttgggcgggtcgagcgggttgacgtatcgcgcctggaaactggccgggttgccgtccgcgtccctgcggacgatcaccgatccccatttcctgcgttttctcgatggcggcctgttctccgtgtccttcattgactttccccttttaggatcttcatatagctctttgctatcaatcatgccaagtacaacgtagctgatgccattatcgccagcccattacgtgatataggtaaatacaggcttattaccaacggggattttgacccctgtgatgctgatgtgtttctattagactcattggttttgattgataattaggaatttttattttgacgggctgaatccgaattcggcgtcggagctccatcagcttcttgtaactatgtcgcccaataagcaagcgcgtccagacgttgtatttggttttgttttagcagagacttgttttcggcaagaggggttcgaccgtttactttgttggaagatgtaccgtgcggtacaaacatgagcagggcgattaacgatctagagaatgagccgaacttgcctattcgctcttttgatgtcgattagtctgtgtgtccttggccttcgtatagcattctgtgactgttttggttttgacggtaggtatgtccagttatggctgaccggcggggtgggaatcagtcgagattatgcttgggggcctgtagatgcctcggcgaaaacgaggctgatcggcaggcctcccaaaaaacgaaaaccttggaacaaagccgaaaacgaccacgtgcgattatcatgcgaggcacgcatgataatcgtactcatagcggtcaagtcctgcagaacgccccgacgcggccggcagcatcgccgcgcccgtaagcggggcacgtcaccgtcagcgcgcgtacaccgtgcgagagccgctcagacgcgacatcgccgactgggggatgtcatggacacgccccagaacggcgtccaacgtcgacgagacggcatgcggcgcccggcgatcgctgcaatccgtccaggagggtcgttccatcggggacgtcatggccgtccgaccatccgcgccggcctccatgtcatactcccggcgaccgtatcgccagagagtcgcattgctgttgcgaaccacccgcgccaaagccgggcgacgtctacgctgaaggaagaacatgcctgcctcgatcccgtatgggcgccgtacctctgatgtccggcgccggtcgatattcatcgtgtcaccataggcgatcccgccaatcgatgacactatcgattacacaccggatcgtgccgtcatgccctcgtccgaaagggtgattttccgcacgcccgtcatccccggggccgtccggcattgcaaaggtcacgcggaaccggcagcggacgggcggaagacttagacgatcgctggaacgaacccggctactgcatcttgcgcaggcgtggcacggcggaatccttcgcgccggtgacgcggtacacgtcgaacacgccgtcgatcttgcgcacggcagcgagcagacggttcagatgctgcgggtcggccatctcgaagctgaactggctgatcgctacgcgatcggagccggtcgcctgggagccggacaggatgttcacgccgtggtcggccagcacacgggtcacatcggatagcagatgctggcggtccagcgcctcgacctgaatcctgaccatgaacaggcccttggtgctggtccatgccacatccacgacgcgctcgggctgacgtcgctgcaggtcgatcatgttctgacagtcggcgcggtgcaccgacacgccctgattgcgcgtgatgaagccgacgatcctgtcgccgggaaccggcatgcagcagcgcgccagcttgacccacacatcgtctacgcccttgacggacacgccgagggagctggtcttcttcttggcgttctcgaccgcgcgcagcggcagcgcctcctgctcaacctcctcatcgacctcgtcgctgcccgcgtccttgaccagatgcgcgatgacgttctgcgtggagatctgcccgtcgccgatcgccgcgaacacggcgtcggggttggggaaattcagctcgtcggcgacgccgaccagcgcctgggtggtcagtagcgtgccgatcggcaggttacgcttgcgcatcgcgcgggtcagctcgtcgcggccctcctcgatggcctcggtgcggcgctccttggagaaccactggcggatcttgttgcgggccttggggctcttgacgaagctcagccagtcgcgggaggggccggcgttgtcggatttcgaggtcagcacctcgacggtgtcgccgttctcaagcttggtgtcgagcggcaccagacggccgttgacgcgcgcgcccatcgtcctgtgcccgacttcggtgtgcacggcgtaggcgaagtccaccggcgtggcattggccggcagcgagacgatcttgcccttcggggtgaacacgtagacctcggccgcgcccagatcctccttgagcgagccaaggaactcgttcgagtccggggtctcgctggtccaatcggcgagctgctggatccatttgaggttgtcggtctcgctcagctcctggttgtcgtcggaaccgcgcttgagatcggatttgtcgggcgcgctcagggcgcggcccgcctgcccgttctccttgtacttccagtgcgcggcgatgccgaattccgcgcgccggtgcatgtcccaggtgcggatctgaatctcgaccggcttgccgcccggccccacgaccgtcgtgtgcaacgactggtacatgttgagcttgggcatggcgatgtagtccttgaagcgcccgggcacggggctccaacgcgcgtgcacggcaccgagcgccgcatagcaatcgcggatcgtgtcgacgatgatgcgcacgccgaccagatcgtagatgttggcgaaatcatggccccgcacgatcatcttctgatagatcgagaagtagtccttcgggcggccggtcacgtacgccttgatgtgctgcgcgtcaagatcctcgttgatctcggcgaggatctgcgcgagatacacgtcgcgctggccggcacgccgcgcgaccagcaccacgatctcgttgtagatcttcgggtagagcaccttgaagctcagttcctcaagctcggtcttgatggcgttcataccgagcctgttggcgagcggcgcgtacacgtcaagggtttcgcgcgccttcttctgggcgctggacgacttgacgtaccgccatgtgcgggcattgtggacacggtcggacaacttgacgacgagcacgcgcacgtcgcggctcatcgcgacgaccatcttgcggatggtctcggcctgagcggaatcgccgtattccatcttggagagcttggtgacaccgtccaccagaccggtcaccgtgtcgccgaattccgcgcggcactcgtccagcgtgtagtcggtgtcctcgacggtgtcgtgcagcagaccggcggcgaccaccagcggccccatgcccaggtcggcgagaatctgcgccaccgcaagcgggtggatgatgtacggctcgccggatttgcggcgctgtgaggaatgctggatgaccgcccgacgataggcacgctccagaatgctcagatcctcgtcggggtgatggttcctgcacgcttgcatgatcggcagcagcgggttcagcgggtcgtcgctgatctcgcagccgagcatgcgggcggcattatgctcggcttcatcgttggccatgtctgcctccctctcaggtatttggtatcacatcctacccgccgcgaatgaaaaagcatacgcggcatcttccgccgtgaacggtctcccgcatgccttggcttgcgggccgtgacggccgtgttcgcaccgtcggccaggatcgtccgtcaggatgacacgccggtggagccgaaaccgcgttccgcacggtcggaacccggcagggtgctcgccgggacgaacctcgcctcgacgtaacgctggatgaccagctgcgcgatgcggtctccgcgatggaactccatcgtatgctccggatcgaggttgatcagagggaccttcacttcgccgcggtacccggcgtcgatggtgccgggcgcgttcagcacggtcacgccgtacttgacggcgagtccggacctcggatgcaccagcgccacgtatccggcgggcagggcgatcgccatgccggtcggcaccagggcgcgctggaacggcttgagcgtcacgtcctcggcggcgaccagatcggcgcccgcgtccccggcgtgggcgtaccgcagctcgaccggatggccgggatcaagcgatttgaccaggacctcggtgtattcgggctcgtcatatgtctcgtcgaacgccatcaggccgcgcattcctcgcacaccggctggccgtcgtcggtgacgtatgccagctggctgcgatgtttgaccaggaagcactccgagcagatgaactcgtcgttctgcatggggatgacagtcacggaggcgtcctcgttgctcagatcggcaccgggcagttcgtaatcctcggcgatggcgttctcgtcgtcgtccatatcggttgaagagctgcgcgagcccttgcccaactcctgcagcgattcctcatcctcgtccttattgcggggggaatcataatcctgagccatctgaatcctttcatcatggtggcacgttctgcgccatagaatacatgacttttactcggcataggatacacgatttgaaatactcgtaaaatacgacacgtggggcacaatagaagaagttgtaattttctgaggaaagtggtgtgaacatgcctgagaacccgctcacacaagcccggttcgaccacgtcgacgacgcgggtcgtctcgtgttcgcgtcaggcgacgagcgtttcttcgtcgatgtggacgaaacgctggaacgcgccattctggaagcgaagcagatccgcgaggagtcccggtcggctcccagcgcatccagctcggctacgctaccgatctcgcagattcaggcgcttatccgggccggcgcggatcccgcgcgggtggcggaacgataccgtctcagcgaggcgctggtgcggcgtttctcgtccgccgtcgaggtcgagaagcagtacgccatcgagcagttcctcaccgtgccggcccccaaggagagccgtgggcggaccaccgccgacgtggtggaacgcgcgctggcgctgtccggcatcggcatggaatcggtgacgtggaaggcgacacgccggggactcgaaccgtggaagatcaccgcgacgttcgacgccgcggggcgcaccgccagggcggaatggtcctggaacatgcacgacaacgcggtggcatgtctgaactccacggcgaagaagctactgggaacggcgacaggcgcgcgcggcgacgggaccgagggcacgccctccgagatgctgcccgcgacgctgcccggggattcggtacgctcggcgaggatagagcgcaccgtgtcggcgtggaacacccctgccccgacactgcctgcggcgcgccccgaagcgcggatgccacgttcggcgtccccgttggacgtgcgcaccgagcctgcgccatccgaggaaggcccctcaatcgacatcccgcgcaccggcgcgcttccggcgaaggccggcgaggccgcgctcggcgccgccgagtcgaaactgccgcggccgacaccggattcggacgcgtccgcttccgcggctcagacggcacccgagatcgaatccgaatccggcaagacgtctgccgaacgctccgaccggcagacgccgcctgcgaaacgccgttcgggtcgctccgccgtgcccagctgggacgagattctcttcggcgagtaggatcgtctggcccgccgtcgctgtccagcgagacacgtcaatccttttttacggaaaaacgcgacaggccgtccggataatgagacatcggcgtgacacgttcggcatcgcaacggtcacgccacgtcaatcaggcagggaatgtccatttccagcgccgtctgcgagccatgcacacccggcagatgcgtcgccttgtcggtctggatgcgcgaatccacgaaggtcgccctcccggccgccgataccagcacgtcaccgagcatcggcctgacacgcggctcgacgacaccgaacatgccctgatcgatcgcctcatcccgggtacgcaccagggcggcgtcacccagccgatcgcgccatcgacgcgcgatgtcattcgggtcgcaatccggctcggcatacagcatcagagacctgggctccccgccgaccagggccacgccccgggcgagctcgggattctcggcgatatcgacgcgctggtccggatccgaaccgaccatgccatgatcagccacgatgacgatgagcgtgcccctcggcgcaagcctgtgcaattgcgccagctgttcgtcaacccgctcgaacacggccgtccactgctcggactcccagccgtaggcgtgccccaccttgtcggcgtcgcggatgtataggtacgtcagccccggcgtcttcgaggcctcgcacgcggccctcacgcggccgagcggccgcatatcgcccttgtagtccgcaccgcgcaacgcggccttcgtcagcggggagtcggcgaacttcggcagtccgcagctggtgacccgcacgccggcggcccgcagggtctcgaacaccgtgggctccctctgcaggtccagaggcgcgatcgcgttgtcgaactggatcagctgcgacagctcccccgtttgggtgttgcgctgcgtgtagcccgccatccccgtcaggcccgggcacgtgccggtgccgaaagccgccatcgcggcgacggtggtgctcggcgcgcatgtggcgatgggcctgtcgttggactcgtcgcgcagcaatgcgcgcagatacggactgtgtccgacgcgcatccgaaggttccagtagccaaggccgtcaaccagcgccacgatcacgctgtcggccttgggaacccccaaggcgacgcgcaaggcctctggatcatggtggatccgcgtggcgaccggatgccctatcgccgcgctgaccgccggcagcacggcggacaggtgcagcgccccgccgcgtacggcgtcacgccgccagtcgccataccgaacggtcggtatcgtctgcagcaattcgtccatgctcgcgatttcagcgttcatgttttccattcaagcaccgtccgtcggaaaaggacacggctgggcgggattcttggcatgattgttcgctatcatggacgattggatttttcaacggcaccatttcggccattcgcgccatgcggatggccgaagcacagattggggaatggcacctatggcacatcgcaccacgactcatcaggcctatgacccgcgtcaggtccaagagcatatcgtggaaacgccgttgaacgaggaaatgagcaagtcgttcctcgaatacgcgtattcggtgatctacgcgcgagccctgcctgacgcgcgcgacggcctcaagcccgtgcagcgccgcatcatctaccagatgggcgagatgaacctgacgcccgaccgcccgtacatgaaatcggcccgcgtggtgggcgaggtgatgggcaagctccacccccacggcgattcagccatctacgaggcgatggtgcgtctcgcacagccgttcgcgatgcgtctcgcgctggtggacggccatggcaatttcggctcgctggacgacggcccggccgcctcccgatacaccgaggcccgtctggcgcccgcggcgctgggcatgaacgccgacatcgatgaggacaccgtcgatttcacgccgaactacgacaacaagctcaaggagccgaccgtgctgccggccgcgatccccaacctgctggtcaacggcggttcgggcatcgctgtcggcatggccacgaacatggcgacccacaatctcggcgaggtcgtcgcggccgcgaagcacctgatggcgcatcccgacgccacgctggaggagctcatgcgctacgtgccgggccccgattggccgggcggcggcatcatcatcgggcgaaacggcatccgcgaagcgtacgagaccggccgcggcacactcaccacgcggtcgatgacgcatttcgagaacgtgacggcgcgcaagaaggccatcgtggtcaccgagctgccgttcatggtcggccccgaacgggtgctggaacgcatttccgaaggggtgaagaaccgcaagctggagggaatctccggcgccatcgacctgaccgaccgccataacggcaccaggctggtcatcgagatcaagaccggtttcgacccgaacgccgtgctcgcgcagctgttccgacacacgccgctgcaggacaatttcacgatgaacaacgtcgcgctggtggatggccggccccacaccatgggtctcaaggagatgctgcaggtgtggatcgaccaccgccgcatcgtggtgcgccggcgcagcgaattccgccgccggaaggcgcttgagcgcctgcacctggtcgagggcctgctgctggccatgatcgacatcgacgaggtcatccaggtcatccgcacctcggatgacgccgacgccgcgaagtcgcggctgatcgcggtcttcgaccttgacgacgtgcaggcgcagtacatccttgacctgcgccttcgccggctcacacgcatgagccgcatcgagctggaggcggagcgcgacgacctcaagcggcgtatcgaggagctggagcgcatactggcctccgcgcaggaactggaccgcgtggtcgtcgacgaaatggatcaggcggttgccgaatacgggacgcctcgccgtaccgtgctgctggacgaggccgaggacggcacgctgacgccggtgacccctcatggagacgacagcgtgaacgcggccgcgatgaaggccgccgcagccgcggccaccctgtcgtcggccgaagcggacgtggccgccgcggccgcagcaaggaaggccggcgaggatgccgcggcagtcgcggcgctgcaaatcgacgacgagccgtgcacggtgatgctcggcgcgtccggcacgatagcgcgctccaccccggccgcattggatgcctgggagtcacggtcgacgagcgacgaacgcacgaaggacgaccacatcgtgtccatcttccgcaccaccacacggtcctcgtacgggctggtcacgtccgccgggcgtctggtgctggcccatgtggtcgaattgcccgcgctcgccgcatcgccgcagacgaacgtcgccggcggcataccggccgacgagctgatcggcatgaccgaaagcaccgatccgattcccggcgagcatgtcgtcgccgccatccccatggatcagcgcgacgacgacggcccgacccccgctcccctggccatcggcacacgggccggcgtggtgaaacgctggaaccgcgaggcccccaccacgatggactcctggagtgtcatcgacctcaaggacggcgactccgtgctgttcgccgccgacgcggcggacgaagaccgcctcgtgttcatcgcgtccgactcctcgctgctgacgttcgatgccgggaacgtgcgcccgcagggtcgcaccgccggcggcatggcgggaatccgtctggctgagggatgcacggcgatcacgttcaacgtggtgcccgcaggcaagatcgcgtggacgtacgaagagggcgacaacggcatgttctccgcgtccggagccgtcgtgctgacggtcgccggagacaaggacgcgctgcccggcaccgaaaacggtgcggccaaggtgacgccgttggagatgtacccgaccaagggccgcggcaccggcggagtgaggtcgcagcgtttcctcaagggccagaacaccctgatcttcgcccgcgtcggcatgtacccgctgcacgcctccaccgagggaggctcgccggtggagctgcccaagcccgacatgcgccgcgacgcatccggtgttgatctggccgcgcctgtcgccttctgtggatgaggctgtttcggggccggtgccttcagcgagcatcgcccccccctcacacacctgtggggcgtagggggggggtgccgtccacgtttcggcagacgcgcagttcctgcaggcgcgcaatatcagatggcacgccgtgtcggatgatgcgcaatgccggatggcgtacctcacgcgtagatacgccggtgacctggcgctggcggcggaacatatcggagaccggcggcggctgtcagcagtagagcctcatgccttggggtacggggacgaatcccgcgacgtgcagcatgcgcgaccactcgcctcgcacagtcaatggctcgtcgttggcatcacagaaggtgacacccccgcgaatacccccgtcacgcaggtttcgctgcaatgcgtaggcgagctcgttgcaggcctgctgcaatgcgggatccgcgtcttgcgcgagcaacagatgatggcttcggggcaccgcgtatgccagcaatcgtccaccccggagcacgaccgatgcgccggagcgccgcgccggcctgatcgaaaacccgcctatcgttcgtggccatgcgatgacgcttccgtacaggttggcggggtcggtggcgtccaacacgaccgcggagggttccgccgcgcatgcccgcagcgcatccacggtctgacgcgacgcgaactgtgcggcaccgcatccgctgacgaacatgccgcgcatcaatgcgccatgctcttccatgcgtctgagcaccggatacaggcccgagaatccgccgtccagacgttccttgtcgatcatgggcggagctatgacgccgtaacggtccagcaacgcctcaatccgcgcgatggcgacccgctccgcggacgcctcctgcatatctgcatgaggcacggcggaccatagtcccgtcatgttcgccgggacactgaccctgacccgcaccctgcgccgtgatgcacgggctggggccttcaccgcatgggatgacgctccgagggatctcagcggatcgaacgagctgttggtgaccttcccttgccagaccagcgaccatagggcctcctcgaactgggagtcggaccatgggtggggcaatatctcgccggtggattcgtccacgcattccgacgacgcgtcccatgccgcgcgcgtcagccctgcgagctgattcgcatgatatgccccgcccggtgccagcacggccatcaccgcatccggcagcgtgaccggctccccgggggcttcgccgttcttctccccatcctgcactgtcagaagcagggagtccgccggatgcaatgcgacgagtcctggttccttcgccttgctgccggtggtcttggaacccacccagacgatctcgccggaggagagcaggccgtcgagcatcgccggacgatagtcgcgcacccgtgccggcaatacggacgattcccataccgagggaggcagggcgacgccttccagctgctcgatgacacgcatcaccccgtcttcgccgtcatatcgttcgccgcccaccggcccgacaccttgcagcccgataaggaatgtctggtattcgctcaattcgacgggcttggtctcggctcgggccttggccagcgacctggcccggatgcgtcggaacacctccttgtgcagccatgcctttcctccgtcctcggcggcgatgccgtcaaggacctctcctcgtgctttgagcatgtccaaggcgtgcaccgcgccggccgcgtcgatcgacaggtccgccatcatccgttcgacggtgaaaggcccgtgcgtcttggcgtatcttgcgacccggccatcgatgtcatcgtccggcagctcgttccagaacgtcctgcgccccagctcctcctcgacctcatgcacggctcgaggatccatgatcgccgagaaatcggcctgccccagcagccgttccagcacatcgggatcgatcgacagcagttgcgccgatcgttccgcctgaggcacgtcgtactggtacatgacggtgcccacatagccgaacagcaggttctcggcgaatggggacgcaatgtcggtcgtcacatcgaccagaccgatgtttcccgactgaatgtccgtcatgatgcgacgcaacgcgggcatgtcgtaatcgtcctgcaggcattcgcgggcggtttccagcagcagcggaaaattgcgtttcagccgcgcggcgttcaacagttgcgcggcacgcagtctctgctgccatagcggcacgcgcctgccgggatcggttctggggaggaacagcgagcgtgcggcgcattccctgaaccgggccgcgaacagcaccgtctcccccacctgcgtctcgatcatgcgctgcatgtcgtcagggtcgaacctgatgagatccgggacatcgatgtcatgctcctgggcgggaagcctcaggacgatgccgtcatcggcggcgtatgcctggccgtcgaatccataacgctgcttgagacgcgcggtgattgccatcgcccatggctcatgcacgcgacggccatatcgggaatggatgatgacccgccagtccccctcgtcgtcggggcaacgttcgatcaccatgcggcggtcatccggcacgacgccggtggccttcctctgctccgccagcagtcgggcgaggttttccacggcgttgtcgtccagcccgtcatcgtgcaggcggtctgccgtggcggtgtcgaaccgtggatggcccgcttctgcggcatccgtcagcccagtgcagacctgccggatgaaagcgccttcggccgtaccgaacccgcagtccctgccgctgccgtccccatgccagaacggcagacgggccgtcctgcccggtgccggggtgacgatcacgcggtcgcgggtgatctcctgaatctgccatgtggatgtacccagggtgatgatgtcgccgacacgggactcgtacaccatttcctcgtcgagttcccccactcttcgaggccctttgcccccatccgtctcgggcagcaccacggtgtacagtccgcgatctggaatcgtgccgccgctggtcacggcgagccgctgcgccccggggcgggcggagatcaggtcctcatcatggttccacatcaggcagggacggaaggcggagaagtcctcgctgtcgtaggcccccgtcatcatgcccatcaccgagtcgaatgtgccgcggtcgaggtcgcggaagggtgccgacctgcataccgtcgcataccagtcgtccggcctgaggtcctccatcgatgcggccgcgacggtctgttgggcgagcacatccagcaggttgcggatcaccgatatcggttcgatgtcgccggcccgcatgctttccacgctcgccgccgccccgatgatctgctcccgggtcagagggtagatcagcgcgtgggacacccctccgacacgatgatccgcgcgtccgatgcgctgcaatcctgacgataccgacaacggaggcgatatctgtatcaccagatccaccgaccccatgtcgatgcccaattccaggctgctggtggccaccacgcaacgcagcaggccatgtttgagctgttcctcgatccgcttgcgccgctccttggacaccgacccgtgatgggccatcgcgatgacgtccccgtcatcgtgagaccgaaccagcatcgtcgtggagccgaccacgggatcgtaatgccgggaaaacccgctgcgcccctccggtgactgcgtctgcgcggcatcggtgccatgatcctgtgcatacaggtcgttgagcctggcggtgagcttctccgccaggcccctcgaattcacgaacaccagcgtggtgcggtgggagagcacctgatccagcacgtcccgctcgatcaccggccatatggatccgcccgcccgatcccccgcggcgccggtgatcgcctgcgaatcgtattgcgaatcctccggcgaaaccagaaccgaccgtcgatccggcgacactggcaggccacgccgttcggcgagccgtctcatggccggggtcacgccgctgatatgcggggccgatgccgccgacgcgtcgacgcctcccgcacggccgggcacattggctgattggaggtccctcatgttctccagcggctcgacgacgcgcaaatccatcgcgggcctctcctgcggattgatgacggtcacgggatggatcccgccgacgaatctcgcgacctcgtcgacaggccttaccgtggcggacaaccctatgcgctgcgtcgcatgcccggcgagcgcatccagccgttccaggctcacggccaggtgcgcgccccgtttggtgccggcgacggcatggacctcatcgagtatcaccgtttcgacgtcgcgcaggatgacgcgcaccttggacgtcagcagcagatacagcgattccggcgtcgtgacgaggatgtccggcggatgggaggcgatggcgcgtctctcccgtgtcgtcgtgtcaccgctgcgtatggcgatgccgatatcgggagcggcaaggccggacgcctcgcattcggcggcgatgccgtcgagcggagcgcggaggttcttcgcgacatcgacggccagcgccttcagcggcgagacgtacagcaccttgacacgccgagtccgacgccgctctccggaaacgtcagccgcgcccttcggagcgatcatggcaccggagccgttcagacgatccgcctctcccgtcatcaggcggtcgatggccgagaggaacgcgcataatgtcttgcccgagccggtgggcgcgaccaccagagcattgcccccggcatggatgaccggccatgcctggctctgcgccgcagtaggtacatcaaacgcatgtttgaaccatgcccttgtaggacccgagaacagattcaaacattcgtacatatattcgattatgcgatgcagcctagacccacgacacaccgctcgaagacgggcgacctactcctcgacccactccagcacatcgcccggctggcactccagcgcctcgcagatgccgtcaagcgtggagaagcgtatggccttggcccgcccgttcttcagcactgagacattcgccggcgtgatgccgacacgttccgccagccccccaccgacattttgcgtttggcgagcatcacgtcgaggttcactcggatcgccatgtcagatcaccacctccagctcgtcgtgctgggcgatggcggccagcacgacgagcgcatgaccagcatcagcagcacgaacgccgcgagcagcagcaggccgaccgcgcccagcaggaccacgcccggagcccccagcgcgacatccacataggcacccgacgccgggtcgcggtattcggcatgggcgagacctccgtacagcgtcacgaacaataccggcgccgcctccaccgccgcgcatgcgatgatcgcatcgacccagcgaaccgcgcggccggaaaacacgtcaagccggtccaccaacgtcagcagattccacagcggcaccatcgccgcctcgacgcacgccacgcccagtatgcccgcgacggcatacacccaacgcgacggagcgaattccgggttggcctgcacgacgtcgcccgacaccacgaccatgtcgcattgccccgccgcggacgatcccccacatgcagtgcagccagttcatgtgacgactcgcgtaatggatcgccacacagttgctcagcgccgcatcgacgccgcctgcgcccaatccgcagggggcggcgagcagcaaattggacatgattctcccggtattatccagtggtatgtacgttcgtacacatgctaggcgaaccgcaggatatccgttctcgcaggccgaacgagcgcgccggcccgccgcgctccggacccgttcacggacgcatggtcattcgcgctcagcgcaaccatagcgtttctcgaataaaaacgagatgattgacccggaaaacctgaacgagaaaaggcggcaacatggtcggcaatgacacgatacacacggtcacgcgtaaggagcacgactgcatcggctacatggatgtgccgaaagacgtgtattggggcatccatacgcagcgggcgctcggtaacttcaccgtctcccgaatcgcggactccacccatccccagctgatgcgggcctatgcgaccgtcaaacgcgcctgtgccgaagccaacgacgagctcggactgatcgaccacgacaaggcacggctcatcgtcgccgcatgctacgacgtcgagaacggcgagctcgccgaccagttcccggtcgacgtgctgcagggcggcgccggcacatcgacgaacatgaacatgaacgaggtcatcgccaatcgggcgttggagctcggcgggcatcccaaaggcgattatgggttcatccacccgaacgacgacgtgaaccattcacaatcgaccaacgacacctaccccgcggcctgcaagctcgcgctgatcgacgccatcgggccgctcgcggaagagacgaagaaactcacgcgggcgttccacgacctcgccgacaagcatacgaacgacgtcaccatcggacgcacccagctgcaggatgcggtgccgatgacctacggtcaggaattccacgcattcgcaagcttcctgaaaagcgacctcctggccctcgaacacgtcgtcccgcaactgaccacgctgaacctcggcgccaccgccatcggcaccggcatctgcgccgacctgcggttccgcacgaccgccacacgccatctggccgccatcaccgggctgcccatcaccgcggcgtcggatcccgtggcggccatgaccgatatgagcggatacatcgccacgtcgcagacagtcaagaacctcgccatacacctgaaaaaggccgccgacgacctgcgactgctcaattccggcccgcataccggattcgacgacctcaacgtgccggcacggcaggcgggcagcagcatcatgcccggcaaggtgaacccggtcatccccgaatgcgtgaaccaatgctgcttcatggtgttcggcatggacacgaccgtcacatgggccgcatccgaagggcaattgcagctcaacgccttcgacccggtgatcatccacgaactgctcaacggcatcgagctgctgacccgcgcgatggcgatgttccgcgagcgctgcgtgtccggcatcactatcaacgcctcgacggggcgccgctacgccgaatactccccgtcgatcgccgccgcactgaacggcgccatcggatacgaacacgcggccgacatcgcccaggaagcggccaacgacaatcgcaccgtgcgcgatgtcgccggcgagcgcaccgacctgcccgcgtcgacgctcgacgagctgctcgacccgatcgccctgtcgcgccgcctcggccagacctgccgggagcatcagtagacggatatcggctcgggccgccgccggcctgatacaagccgacggcggcccgagcagtgcacagccggcagaaagccggatcaggtgtcgatcttggagcggtcgaaatcgtcggcgttgtcgacgatgaacgccttgcgcggcggcacatcgtcgcccatgagcaggctgaatatctcggacgcctgtgccgcatcctccatgcggatgcgccgcagcatgcgcgtgcgcggatccatcgtcgtgtccgcgagctggtcggcgtccatctcacccagacccttgtagcgctggatgtcgggattgtacgagatgtgtcgccgttcgagatccgccagacggccggcgagctcgtcatcggagtacgtgtagatgaactcgcccttgtgcgagccggcgagcgcgatgcgatgcagcggcggcacggcggcgtagacgtacccgtgctcgatgagcgggcgcatgtaccggtagaacagcgtgagcagcaggatgcggatatgggcgccgtccacgtcggcatcggtcatcatgatgaccttgtggtagcgggactgctcgatgtcgaaaccggcgccggatcccgcaccgaccacctggatgatcgcggcgcactccttgttgttgagcatctggctcaacgatgccttctgcacgttgagtatcttgcctcggatcggcagcagcgcctggaatccggaattgcgcgcagccttggccgtgccgagcgcggagtcgccctcgacgatgaacagctcggccacatcgtcgttgcccggctggcagtcggacagtttcgacggcatggcggcggattcgagcgcgttcttgcggcgcgtgacctccttggtcttgcgcgcctggatgcgggcgtgcatctcgccgacaatcttctccagcacacgaccggactgctccttgtagccgcgtttggagcccgtgatcatctcgccgaactgcttgtcggtcatcctggtgacgatgggcttgacgggagcggtgccgagcacgtccttggtctgcccctggaactgcggctcggcgatgcgcacggtgacgacggccacgagtccggccaggatgtcgtcgcgctcgacacgcatgttcgagtccttgaggttcaccttgagtttgcgggcgttgtcttcaacggccttgcggatctgcttggtgagccccatgaggaaaccgtcgacgtgcatgccgccgccgggcgtctcgaccacgttgacgaagctgcgcatcgtcgtgtcgtacccgttggtccaccgcattgcgatgtcgacgccgcatttgcgggtgactttctgggcgtgcagttcgccgccctcgccgaccgcctgggtctcctcctcgtaggtgtcctcgccggtgatgcgccagatgtcggataccgcctctcccgcggacaggaaatcgacgaagtccttgacaccgccggtgtggcggaattcctcgacgcgggcgtgcgtgtggcgggccgcgtccaccttcgccgtctcgaccgcggcggagactgcggcaggtcgcgcttcggcttcacccgcttcaacggtatcttcgacggccgtgtcggccgcagaggcgatgtcggcagcgtccatcaggccggttccatcgtcggcgggcgtctgtgcggcgtcgacttccatcatctcgtcgacgctgtcgtcgccggtttccggcacgttctcgtcgatgacggtgatccgcagtcccggcaccaggaaactggtctggcgcacacggtcgatgagctgctcgtagctgaattcggcggtgtcgttgaagatttcgggatcggcccagtaccggatgcgcgtgcccgtggtcttcgggctgaccttgccgatgatctccagttcggtcgggcggttcttgcgggtgcgcttgaacggcgcgtccggggacggatgctcgggatcggtgtcggaatatacgcctggatgaccctggtggaaggccatgtgatgggttttgccgtcgcggtcgacctcgacgtccagacgcgagctcagcgcgttgacgacggacgagccgacgccgtgcaggccgccggccgcgttataggacgcgttgccgaacttcgcgccggcatgcagcttggtcagcacgacctcgacgccggtgagcttggtcttcggctcgacgtcgacggggatgccacggccgttgtcggccacttccacggagccgtcgtcgtgcagggtcaccgtgatatggtcgcaggcgcccgcaagcgcctcgtccaccgcgttgtcgatgatctcccacaggcagtgcatcagaccctggctgtcggtggtgccgatgtacatgccggggcgcttgcgcaccgcgtccaagccttcgagcacggtaaggctgtcggcaccgtattcctgtttgggcatacaaatcctattttctgtataactcgcggctctcctcatcgaggggagctatcaacggatggctccgtcggggggggcagtccactggaccgcccctcctcgcgtgatcgcgctgccgagcggcgcgatcactgatcgaggaagtcgcgcagggtctgggagcgcgacgggtggcgcagcttcgacatcgtcttggactctatctggcggatacgctcacgggtcacgccgtacacgcggccgatatcgtccagcgtcttgggctggccgtcctccaaaccgtaacgcatcttgatgacgccggcctcgcgggggctcagagtctccagcacctgcttgaactgctcctgcagcagcgagaacgcgaccgcgtcggacggcgcgatggcgtcggtgtcctcgatgaggtcgccgaactcggaatcgccgtcctcgcccagcggcgtgtgcagcgagatcggctcgcggccgtacttctgcacctcctgcaccttctcgaccggcatgtcgagctcgcgggccagctcgtccggcgtgggctcgcggcccaggtcctgcagcatctggcgctggacgcgcgacagcttgttgatgacctcgaccatgtgcacgggcacgcggatggtgcgtgcctgatcggccatggcgcgggtgatggcctgacggatccaccacgtggcataggtggagaacttgaagcccttcttccagtcgaacttctcgacggctcggatgaggcccaggttgccttcctggatcaggtcgaggaagagcatgccacggccggtgtagcgcttggccagcgacaccacgagtcgcaggttcgcctccagcaggtggtccttggccttcttgccgtcgttcgccgcccacttgagctcgcgcttgcgcttgaagtccatgccgtcgctctcggtatcgagcagatgctgggcgtacaggccggcctcgatgcgctcggagaggtccacctcctgctcggcgttcagcaggctgacacggccaatctgcttgagatagtccttgaccggatccgctgtggcgcccgcagcgatgacgcggcgcttcggattgcccgacggggtcaggttctcgtcgtcgtcatcgtcgcgcaccacgaacgcgcccttctccttgggctgttcaggctccttgcgcccgggttcggtcccctcgtcgtcctcttcgtcctcgggaacgtcgtcatcctcaccggattcgtcatcgatgtcatcatcgtcgccatccagaccgccgtcatcgacatcgtcgagatcgtcgtcaaggttctccagaccatcctcatcgacctggacgtcgtcgagatcgtccgaggaatcctcgttggcgagttcctcggtcttcgccatctcctcggtctcgtccttgacggccttcgccgacttggacgcggcgcacttgcgggtgggcttcgcgggcgcggctgccttcgccgaggacttgcgtgccgtggacttggacgcggcggatctcgacgaggtcttcttgcccgcggcggacttcctactcgctgcggacttcttgtctgccgtagaggccgtacgcgcggcggttcccttcttctcggatttcgtcttggcgtccgtatcgtccgggactgtcgtcgccatcgtatccttcgtggccaaactcatcctcctgcatcatcatgccaagcgtgcttataccacatcgggcgcacttctggcaagagcaaatcgtcaactatgcgagttaaccatcttccaaggacgattattcccacggcttgttgcggcgtggaaccgatggtctcccgcgagccgtcatgcggcgtcgtgatgcgggccggcacccatccacgccggcataacgccgcgctggtacgccgagcacacgatcgccgccagcgaacagtcctcatccagcatcaggcagcgcaacgcgaacgccaccgctcgactgtcgcccatccaccacatcacatacgccagcacggccagcggctgtacgctgaagctctccggaacgcgatcggccatggccacgagcatgtcggcgccggcccggcatctcggttcgtcgggccggcgtcgctcgtcgaaaaacgcgccctgcagctccctgcacatacggctctgcacatccggcgcatgcgagcgcgacgcgaaatccatcatcgtgcgcttgtcggcgcaggtgtccccggccaccaatgacatgatcagggcgtccctgatcgacaacgtcaccgtcattcccaccaccagcgcggcgatcgaggcgtcatcgatggcctgcggctgcgccgacaggcccgccagccaatggtcgaacggctcatcggcccattgcgcgtccgccgccacggtgccgctgagcttgcggcgctcgcagtattcatcgcgcatgcgtctgagatcgtcctcgcgcagcatgtcatcgtccgcgaccgcctccgcataccggacggcctgcgtgttcgtctcctgtcccatatcgtggtcccccttaccggtctcatccaccgccggcgcacgatgccggcgaccgccgcccccgcgacgggataccatcaactatgccgtatcgggccggttttcagggcgaaatccaacctatgtggtcgaaggcttgtcaggcttgcaaatccgcagttcttgtattcgtaaaaccctgtggataacctctaggtatgactgtttcatctgatttggccctgatcgagtctcgcatcgccgacgcggtggaccgtttcatggcgctcgacgccgacgacaccatcgaaggcccgtgcctgaccatatcccgcgaggtcgcgcgtcaggccctggtctccagcgaaggcggcaagcggctcagggcgttgctggccctccacgccttcgacgcgaccgacccgcaggggcatgacgacgatgacgcccatgcccgcggacgcgacgcggtgctcgacctggcctgcgcgatagaggtcttccagaccgccgcgctcgtccatgacgacatcatcgacgactccgacctgcgacggggcaaacccgcggcccacaaggcgctcggcacgccgtcgcacagcgcgtcgctcggccgaggactgggcatcatgctgggagacctgctcgccaccgccagcgtcgacatcgcccatgccgcggcgcaacggatgccccggcccgacatgatcgtctcgacgttcctgcgcatgcaccgcgaggtggagatcgggcaggtgctcgacctcgcagttgagttgtctccattggacgagccggaacggctcgcacgggaatccatgaacgtgttccgatggaagaccgccagctacacgaccatcgcgcccctcgaattcgcgcttctcgcctccggccgagaccccaggcgggcacatgccgacgccatggccatcggactgccgctcggccaggcgttccagctcgccgacgacctgctggacgtcatcggatccagcagatccaccggcaagcccgtgggaggcgacatcagggagggcaagcgcaccgtgctgctcgcggacgcgatcagcggcgccgaccagaggcagcgccgcacactgatcgacatgttctcgtcgcagtcgcggggcgacgacgacgtacgccggtgcatcgagctgttcgaaggcaccggcgccatcgaccgatcccgccggcgcatccgcgcactgtggcagggcacgcttcatgccataggggacctgcggctctcaccgcaggacgagcgcacgctcaccgaggcatgcatgaggttcatcccgatcatcaaagcgtagagttttcgccaacgtatgtattggaaatgccgttttccagcagaaagaaccttacgatacaaccatgagtgaagtcgcagccacgtcgcaagagccgcagggacgaatgatagaggggcggtaccgcgtcatacgcaaaatcgccgaaggcggcatggcgaccgtgtacgaggcggaggataccaggctcgaacgccgcgtcgccatcaagatcatgcacatgcagctggcgcagggagcgcaccgcgagcagttcgtggaacggttccaccgcgaggccaagtccgccgcggcgatcgcgaacccacatatcgtgcaggtgtatgacactggcgaattcaatgggctggactatctggtcatggaatacgtgcatggcgtgaacctgcgtcacgacatgaacctgcagggcacgttcagcgtgcgcgagatgctgcgcgtcatctccgagacgctggacggactggcagcggcgcaccgcgtgggcgtcgtccaccgcgacatcaagcccgagaacatcctgatcaacgaccgcgggcacgtgcagatcaccgatttcggcctggcgaaggccgcgtcgcaggcgacactgtcgaccaccggcatgctgctcggcaccgccgcgtatctggcgcctgaaatgatcgaggacaacaaggcgaccatgcagggggacctgtattccgtgggaatcatggcttgggagatgctcgccggcgacgtgccgttcacgtcggacaatcccgtcaccatggtgttcaagcacgtgcatgaggacgtgccgtccctgacctcgacctgcacgggcatcaaccagcaggtcgccgatttcgtctcgcatttgaccgcccgcgccgtcgaggcacggcccgccgacgcatccgacgccctgcatgagctgcaacagctgaccgcgaacctgccgatggacgcatggcagtaccgcaagcccgccgacgtaggcaccagcggcgataccgaggagccgaccgcccccgcgctggtgggcgccatcccggccccgcccgcgccgccgctgttcgattcgcgcaccggcaccgccccgcagaccggcaccgcccctgccacggcccgtacttcggtgatgcctgaaggcaccgcaccccaggacgtctccgccacccaggtaatcacaccgcaggatcccgcactcaccatcgggctgatggacgcgcgcccgctcgatgaccaaggctcggagcccgccaagcgcaagcgctcgaagaaacccttgatcatcacgctcgtggtggtgctcgtcgtggcgctcgtcgccggcgcaggcggctcatggtggtatttcctcggtccgggcagctactggacgctgccgcagcccaccgacgtctcctgcaaggagaacatcgaatgctccatcgtcggggcgaagtggagcgattaccagagcacgctgaacgtggcgaacatcccgttcacctcttccgaggcgtacagcgacaccgtcgccaaggggaacatcatctccgccgacccgcagaacgtcggcacccatatcagcaagcgccacaacggacgcatcacggtgacggtgtcgcttggcgtcaagcaggcgaccatccccagcgacatcgcggatccgacgtcggccgatggcaaggatccgatcaaagcgcttgagaacgccggattcaccaacatcaaacgcgatgactcctcagccgaatattcgatgacgttgccggagggagccctgcaaagcatttccgagacgcccggctcgaccctggaccacaacgccgagatcaccgtggtactgtccaagggactcatgccggtcaccatgccggacatcgtcggcaagaccaaggacgaggccatgaccgccctcgacaacgcgaagctcaagaccaccgtttcggaggagtacagcgacagcgtcaagtccggcagtgtcatctccgcctcgcccgactccggtaccgaactgcattggggcgactccgtgaagctgaccgtatccaaggggcccgagaccgcggacgtgccgaacctcgtcggcaagagcaagagcgacgccatcaagacgctggaatccctcggtttcgaagtcaagaccggcggcttgaacatcctcggcctggtgcagcagcagagcgccaccggcaagacgaggctgcgcgacacgaacggcaacaagaccgtcatcacgctcaccgtcgtgtgacggcggcgcgccggcatataccggcatatacgcgaagcggctccccctctatcagtttgagagggggagccgcttcgttcgcgttcggaatcgtcggtcagcggccttcgccggcggttgcggcttcggcctcctgccgggccttgagctccgccttgaccttctgggcgtactcatccacgtattcctgtccgctgagctttcggatctcgctgacgagatggtcggtgagcgcccgcacctcctcatgggtgatctcgtcggcgtccttgcgatccaccgggatgggcttgccgtatatcaccttcgtcttgcccttcgacgggatgacctgaccgggatgctgtatctcgcgcgttcccaccaacgcggtcggcaccagcgggcagccggtctccagagcaaggcgcgcggcaccggtgtggccccggtacagtcgcccgtcaggactgcgcgtgccctccacgtggatgccgaacaggtgaccttcctcaaggatctcacgggcgtgggccaacgcgcccagcgacttcgagccgccggaacggtccacggggaacactcccaccgacgtgaaccaccatttcttgaaccggcccttgatgcccttgccttcgaaatactcggccttgcccatgaaatgcaccatgcgcgggcaggtgatgggtatcagcgcatcgtcgatgaccgccagatggttcgcggcgatgatggcaccgccttcacgcggcacgttctccagtccgatcgccgtcggtcccatacgacgacgggcaatccaaccgaaacctttgacaaagaaccagtacagcacgatgacacctcccaagtttggccgtccgcctgattacagtaggacggtatgaccgatcatcacgatagcaaccacaacgataccaacgcgggtgaagaacatccaaacaccacgccgcgcgccggacatgacgggtatgacacaggctccaatgccggcgacgatctcgactgggccgccttcgccgcggagcatgccaacgacctgcaggacgtcgagcgctcacgcaacgcgcggcacttcgagaagcatgcgcagcgcaaggagaaggaggcgctgctgtcggtcgacgatctggacgccggcacgttcaccgatgacaaggtgccgctgcaccagcgcggccctcgcgaccatggcggccgcagctggctcgataccgatgacgtcatggacgagtacggcgatgacttcgtgccgccgaacccgaaaatcggccgcgtgaacgcctcgaagctggtgttctggatcctgctggtcgcaggcgtcgcgggtatcatcgcatccgtgttcgtacccgccctggcgacgttcctgggctccatattcggtctgtgcgcgctggtcggcggcgccggcctcatcctccaacacaaggggcacaccgagacacgcaccgacatgttcgacgacggcgcgcgggtgtgacgacggtgcccgtccacatcggacggccaccgcaatggtcaggccttggacttggcggtctcgatccacttgccgaacagggccgcggccttgccggaatcgacggtgttctcggcgagcgcatacgcctcacggaaccgctcggcgagtgtgccgccgccgaccaggttgccgtctgccacgatggcagacgcagcgttgagcaacgcggtggtgcgtgacgggatgtccttgccggccaagaagtccgtgaacgcggcggcgttcacatcgggttcgccgcccttgagctgctcgacggagatcttggcaagacacagatccacggtcgggtcgaaatcggtttcggtgaccttgccgtcgcgaatctcccacacggagatcgggccggtgggagcaagctcgtcgaggccctcgtgcgaggtgtagaccaggccggactggccgcggctggcgtacacggcggccatgatcggactcagcttgcggttggcgcagccgatggccacgtgcgccggattggccgggttggtcaacggtcccaggatgttgaacacgcacgggatgccgagcgcggcgcgaatcgggccaacaaagcgcatggccgggtggaaggtgcgggcgaacgcaaaggtgatgcctacctcgtcgccgatctccccgaccgcctcgggcttcagatccatcggcaggccgagatcctcgagcacgtcggcggctccgcacttcgaggaggcggcgcggttgccatgcttgacgatcttcacgcccgtcgcagctgcggccacggaacccatcgtggataggttcacggtggcgaagccgtcaccgccggttccgacgatgtcggtggtctcaccggacacgttgagcggcacggcgtgggagaccatggcctttgcggcgccacacacctcgtcggcggtcagtcccagctgctcctgcatggcgagcgcggcgcccacggcggccggatcggcgttgccctgcatcaggtcgtcgacgaaccactccgattcctcagcgctcaggtggtctcccccgaccagcttggtgagaatcgacttccatgtgatctcggccatgatgccctccttggcgtttcgtcacgccgtgtgatatgtattcgtcgcctcattgtaatggcttgtcatttcgtcgcccgtaatcttccatattgcaaaacatcatcggctcccgtcagcgggagccacttacttgtccggcccggacagcgtgccgacaatcagggcaggcaacgcggcaggcactccacgatgccgctacgggagtcccgactgaaacgttatgcagtatcccaaggctttgccgggcaatggatcggaatcgctgcagggtcaatgagatcgccgcgtgcgtaccaggcctttgcactgatgggcaccgaatatggcggacaacgcacgcgtatatcgattgatgcacgcgttgtcctgagacgatatcgggaaccccagatagtggcattttacaaacggtagaattccaacgattccgcgatttgcgtcgtgggacaacgcacgcgtcaaccgattgatgcacgcgttgtcctgcggtatcgctgtacaacacgcgcgaatccatcaaaatcgtgcgttgtacagcgaatgaggctcggcgaacctcgattccgcggccccgcgaataatcgacgggctcaacccgcggacaagcccttcctctccccccgaaaacgcaagtggctcccctcacatcgaggggagccacttactcgtctagtccggagagcctatctcactcttcgttctggccgtggcacatcttgtacttgcgaccggaaccacacgggcactgcgcgttcttggacgtgccggggaacgtacggccgtcggaccacggggtcttcagctcctcgttcttcgggcgcttgttggcgggcaccttgccttcggcatggctgatcggagccgggccggtgatcggcgcagtggcctcgcctgcggcggattccttggcggactgggcgatggcgaccttttcgtcggattcctccgcagtctcagcctcaccggcgtcctcggccttgtcgacttcggagctcgcggcgccgacggcctcttcggcctcatcaacgacggcgtcatcggactcgatgccggcttcctcgctcctggacacctgctgcacgtcgacgtggaagagcagctggacggactcctccttgatcgcctcgatcatggagttgtacatctggtagccttcgcgctggtactcgaccagcgggtcgcgctgacccatgccgcgcaggccgatgccatccttgaggtagtccatctcgtacaggtgctcacgccacttgcggtcaagcacggcgaggaccacgcggcgttccaactggcgcaggccttcctcaccgaccttctcctcaagttcggcgtactcctccctggcctgatcgacgagggagtcgcgcacggccgcaacggccttgtcgcccttgagcttgtcggcggcgttcttggcggcgtcctggtcaagctcgaacgggaacacggtcttgagggccttgaacaggccgtcccaatcccagtcggagggcttgctggaacccttctgggcacccttgatgtagctgtcgatggtatcggcgatgaagcgctcgatatcaccgtgaatgtcctcgcccttaagcaccgcctggcgctcggagtagatgacggtacgttgtttgttcatcacgtcgtcgtacttgaggacgttcttacggatttcgaagttgcgcgcctcgacggtcttctgtgcggtgcgcacacccttcgacacgcttttcgcctcgatcggctcgccttccggcatgcccttggccatgacgcgggcgacgagctgcgtgttgaacagacgcatcaggtcatcttccagcgacaggtagaagcgggactcgccaggatcgccctgacggccggaacggccgcgcagctggttgtcgatacggcgggattcgtggcgctcggtgccgagcacgtacagaccgccaagctcgacgacctcctcatgctcgtccttgacctgctccttgacctcggccaaggtgcccggccagcgcttctcgtactcgtccggcgtgtcctcgggggaatagccctcggacttgagcttctggtcggccaggaactcgacgttgccgccgagcatgatatcggtaccacgaccggccatattggtggcgacggtgacggcgcccttgcggccggcgaccgcgacgaccttggcctcgctggcgtgctgcttcgcgttgagcacctgatggtcgatgcccgccacgtcgagcagcgaggagacgacctcggaggactcgacggatgcggtacccagcagcaccggctggcccttggcgtggcgcttggcgacgtccttgacgatggcggccagcttctccttcttggtgcggaagatgaggtcgtcctggtccttgcggatcatcggcttgttcgtcgggatcggcagcacgcccagcttgtaggtgcccatgaactcggcggcctcggtctcggcggtaccggtcatgccggcgagcttgtcgtacatgcggaagtagttctgcagggtgatcgtggcgaaggtctggttctcggccttgatctccacgttctccttggcttccagcgcctggtgcagaccctcgttgtaacggcggcccggcaggatacggccggtgtgctcgtcgacgatcagaacctcgccgtgggtaacgacgtagtcgcggtcacgcaggaagagttctttggccttgatggcgttgttgaggtagccgatgagtgcggtgttgctcggctcgtacaggttgtcgatgccgaggaagtcctcgaccttggtgatgcccgggtcgagcacaccgacgaccttcttcttctcgtcgacctcatagtcctcgtcgcgggtcagcttcggcacgagacgcgcgaactggcggtaccaacgggtcacgtcgccctcggccggaccggagatgatcagaggggtacgggcctcatcgatgaggatggagtcgacctcatcgacgatggcgtaatggtggccgcgctgcaccagatcggccttctcccatgccatgttgtcgcgcaggtagtcgaagccgaactcgttgttggtgccgtaggtgatgtcggcgttgtactgcttgcggcgctccgccggcttctggtcggtgatgatgcagccgacgttcatgccgaggaagcggtagatacgacccatcagctcgctctggtagcttgccaggtagtcgttgaccgtgaccacgtgcacgcccttgccttcgagtgcgttcaggtagctcgggagcgtcgcgaccagggtcttgccttcaccggtcttcatttcggcgatattgccccagtgcagggccgcgccacccatgagctgcacatcgaagtgacgctgtcccagagtgcgcttcgacacctcacggacggtggcgaacgcttcgggcatcaacttgtcaaggctctcaccgttgtccagtcgctgcttgaacttggcggtctggcctttgagttcctcgtcggacagagcggaaatctcgtcctcaagggcattcacggccttggccacgttctccagtttcttgagctggtgcccttctcccatacggagggctttgtcaacgatatctaccacattcgctccctatttaagctttcgtacgtcaacgagcatagcctgatgcccgacatcaggcacaaactccatccatgatatgcgaacactcggatttttgccgttccgacccgctggacacgcccatcgatacttgtttcgtcgtgtgccgacacgcaaatatggcctgcctggatatgccgggcaggccatgtatcacgtggcggaacacttacttgttcttgatgttctccggggtgtcgatctcgaacacgccgtagctccaaccgtggcggtggtaaacgacggacgggcggccggtctccttgttgacgaacaggaagaagtcgtgaccgatcagttccatctcgtacagcgcctcgtcgatgctcatcggctcggcgatgtgcagcttgcggcgaatcacgatcggcgtgtcaccgacctggacctccaccgactcgcccggaccgaggtcggaggcgacggcggcttcggggctgttgttcggctcttccagctccggctcctcttccggttccggcggagcgaccgctcccagatcgacgggcgtcgggttgatgtacccgcggcgatgatccttgcggcggtcacgggtgcggcgcaggcgcagcgtcagcttgtcgagcgccatgtccagagcactgaactcatcggtgctggaagcctcggcgcgcaccacggtgctgcctgcgatcacggtgatctccacacgcttcgcggtgtcggcctgacgcggattcccctcatgcgtcagcacgatctgagctcgttgcgcatccggcgcgatagcggtcacacgattcatcttgctttcgacgacatcacggaacttctgcttgacttgcgtatgacgtccggtaacgacgatttccatgtggacctccctatactcaagcggtgtcacccgctatatgtgtgccgaatggcgtcatcaccacccgggtaagtttcattgtagccgaacagagggtaaacggcggggaactcgcccagagaaatacgtttcttttttcacaggttcccgtaacgttgctgtgcttatactgtgcggcttactttccttgaaggaaactgttatactttttggtctggcgacacagattgttgcgctgctggtattgctggcgctgagccgcagcatcacatcaatggaggtcttgctctggatggtcgtcatagaggtcgtgtggtccgtgtacttcgtcgtcaccgaacgctggcacgacaagcttgccagcaaggcaatgctgacggtctaagaccattcgggcagaatcgagcatgcaagcaaggccagcgacataacggtatggaatgttcgggaggtgcctgtgccagtcgagccacgattcgatcctgtgatccatgagccgatgcggctgcggatctgcggcatcctgtcgacagtggacgagatgcagttcgccgcgctgcgcgacacgctggacatcagcgacgcggcgtgctccaaacacctgaaggtgctggtcgactgcggctatgcgaccgtggagaaacgggaatccgactccagccggcacatggtgcgctggtatgcgctgacctcggcagggagagacgccttctccggccatatagcggagctcaaaagactcgcctccggactgctctgacgagtccccccccccggctgtcggtagctgactgtgggggtggccaccacccgcatgaccacccaccggcgccacgcgccacctcccgccagcgggaggatgagcacccccaccgacagcaattcggcattcggcgttcatcgtctcgcccggtgcgccggcccaccctgattctcctgcgtaaaatccctggcctgccgtatagtagctgattcgagacccccagatggccgcggccgcgtcattcatttggcaaggctgaggaacttccgggctccgcagagcacgatggcggataacgtccgcccagggtgacctgagagatagcgcagcagagaacagaccgcccgcgcaagcgggtaagggtgaaacggcggtgtaagagaccaccggtccgctggtaacagtcggtcgcatggcaagcctcatcgggagcaaggccaagcagaagacggcaagggctgctcgcccgtgtcttcgggtaggccgctagagcctggcggcaacgtcaggtcgagatggatggccatccgcgtggcgacacgcgacagaacccggggtatcgggggtctcgcttttctttaccccccccgaatccgcatacctcccgccaacacattcctcccaccaatatgagggcgcgcgaacgaaacaacgcaatgccggcagccccgttccctcccgctggcgggagatggcgcgaagcgtcggagggtgttctcacgccggcaatgcggtaagaccaccggatcgacaaaccaccgggccggcaacccgccaccccgccaagccaccggggcatctcccccgcttgccccgcgctgtatctcatctaagagatagttcattgagatagttcattctaatcaaatagctcatgggctacggcacgcagggtttcggcgtcgtgccccttgcgcccgcccgaggaccagaaccggcgcttgcgcactttcgggtccatgccctgtgtcttggcggcgctgcgccgccccaactcccatgcggcgtcctcgaagacaccgctcatgcgggcctcgtcgcagacccgctccgccagcggacggtcgacccccttgcgagccagttccataaccgcaccgcggtatcccatcagacggccgacgcagtagcgcacggcggattgcgcgtacgactcatcatcgaccagaccaacctcgatcagcctgtcgaccactgcggcgaccgtctcatcgtcataccctttgtcgatcagacggtctcgcagggcgcccgatggacgatccgccgcatccagcaggcgcaatgcggactcccgacacgcatcgacatcgcagggatcctccggctcccgcccaggccgcgacatgctccgcgcggagcgccgagccgggcggttcccatgtgaccatgttccgcgtcgcggggagtcggcgcccggttcgacaaccggcgtctcacatgttccatgagcggcgaggaacgcttctgcgctgatcatgcggcaggcgatgcggcggcagtgggcgcgccatcctccggcgccgtttcaggggcatccccgtccgtcgcggactcaccgtcggccagctgatcgggcacttcgatgaggccgaattccgccttgaccttgttgccgatctcctcggtgatctgcggattgtccttgaggaacttgcgcacgttctcacggccctggccgagctggtccccgtcatacgtgaaccatgagccggacttcttgaccacgttgcactgcaatgccatgtccaggacggatccctccttggagatgccctcgccatacagcacatcgaactcggcggacttgaacggcggagccatcttgttcttgacgaccttgaccttggtgcggttgcccacggcctcctcgccgttcttgatggtctggatgcgtcggatatccagacgcaccgacgcatagaatttcagcgccttgccaccggtcgtggtttcggggttgccaaagaacacgccgatcttctctcgcagctggttgatgaagatggccgtggtgccggcctgtgccagagcgccggtcatcttcctgagcgcctggctcatcagacgggcctgcagaccgacatggctgtcacccatatcgccttcgatctccgccttgggaaccagggccgcgaccgaatcgatgacgatgacgtcaagggcacccgaccggatgagcatgtccgcgatctccagcgcctgctcgccgttgtccggctgcgagacgatcagggaatcggtgtcgacacccagatgccgggcatagaccggatccagcgcgtgctcggcatcgatgaatgccgccaccccgccgttcttctgtgcgttggcgaccacatgtagcgccagcgtcgtcttgccggacgattcagggccatagatctcgacgatgcgccccttcggcagaccgccgatacccagggccagatccaacgccagcgatccggtgggaatcacctcgacgttctgctcgggcttgtcgcccaagcgcatcgcggatcccttgccgaagcttttctccacttgctccagagcggagtccaaagccgccttgcgtcggggatcgatgccgtcccccaccggcccattgcttgcggcctcacgaacagaggccttcgacgcggccttgcccgccccacctttcgaggtcgtacgctgtgccatgtcaatctccttacgttgtcatccatatgcgccatatgccacatgcatcaaccgtacggaacatacgaaccccggcgcaaacgaatccggccaatgtggtcgaaggctccccggcatccatcgatccgcaccgactcccccttactgtcgcaaggaattcgtcggcgtgtcgaaccgtgcggcgcactacgtcatatcatcgtgcactgtggataactataccccaataggcgaacacctgttcgatatcacccgttccgcgtgtctcgtcagcggaccggcatcggaggcgcgttgtgatcggagccccaacgctggggatcgggaacgtccatatggtcgcacagcacgttccataccacgcgcggctgctcccccgcagacagcgcctgcgccgcggtaagtcccgcgagcgcgtcaagatgctgatcctggaccaggctccggccatacccatgaccgaacacctcatccaccagttcccagaattcccgttctcgcatgtctcccagtctaacccggccccgccgctgcgaatgccggcataccaatcgactccacgcccccgaacacgacgaaaccgcccgccgggcctcaagcccatgcggacggttcctctcatgcacccgatacgacgatatgcatatgcacgcggcatccggcgccgcaaatcgctattcgccgatcgaatccagataatcggcgacgagccgcagcatctgcgcggtgcttacacccagtgatcccgcgatggagctcagcagttcggagcttgcctccttctgcccgcgctccacctcggacagatagcccagcgacacgccggccttctcactcacttcacgcaacgtcttgttgtcgcgggtgcgaagatcgcgcagcacatggccgatggcctcgcgcagcgacacatcctttccctcgggcagcgtctcgacgccacgcgagaccgcgcgctgacgcggttcgaaggaatcctcctccatacgcatacgattcagttccgcctgccgttcatccttggccttcttcgccgcacgcgcccgcagcacctgctgctgggcgaacaacacggcacgccgctgcgccggcgtgagatcacgcatcctggccgtacccggctgcacctgcttgacggggatgccagccgtttccatccgctcgcccgttcgggtcatcgtttccatgagaccctcctttcatatcgtccaagtgcttccactgtgttcaacaccgccggcggcggtttattcctgcatatctcctgtgaaatggctcacgatttgcacaaggctgaatacggcaccgcgacggacctcctcgcgcccacccgtcagatgaagctcgtgggcggtcacggacggcacgccgtcagggcttatggcggctggaatccgcactcccacatacaccagtcccgcgggcttgtctccatccggtccgggccccgccacgccggtggtcgacaatccgatgacacggtcagcgtattcgggctgcccgtacagcccggcgaccgacgccgccatctgtcgggccacttcgggatgcacggccccttcgcgttccaacaaaccgcggtcgacccccagaatcgacgtcttggcacgaatgtcgtaggtgaccgccgacccgagaaacacgcgggacgcgcccggcacgcgcacgaacgcatcggccagcagcccgccggtcaacgactccgccgcaactatcttcacgtcatgcgcctcgcaaaaccgcagaatccgcgcggccatgtcgtcgcaacggcacgaatcggcatcattcatcgcaatccccctccatcaaacgccatcaaacaaaacgccgccgtgcgcaggcacgacggcgtccactcgctcagtccttgtggctcccgaacgtgttgatcagatatatcgcccccgaatacaggcacagcatcagcgcgatgtatatcagggcgtacgtcagcgtgtaatatcccgtcatccacaccggcgcggtctgggccggattgaacacccacacgggcagcagcagcatcgacaggccgatgcactggaacagcgtcttgagcttgcccggccaggcggcggcgatcaccttgccgcccttgtcgatgacgaagaagcgcatgacggtgatgcccacctcacgcagcagaaacagcgcgacgatgatccagccgagccagacgggaccgagctcgccgaacaccgcggccacgatcagcgtggcgcaggtgagcagcttgtcggctatgggatccatcagcttgccgagttcggtgacctggttgtacttgcgggccatccacccgtccaccttgtcggtggacgcggcgacgatgaacagcacggccgcggcccatcgcatgggaatgttgttctcgccccacgagcctgcggtgatgtacaggccgaggaatatcacgaccagcacgatgcgcgaatacgtgacgaggttcggcggtgcgttccagccgtccagcagcgacttcttggcggtcgccgagcgttccgttgtatcgttttgcatatcgttttccatagtgttcacgatacccccacactcctaccttggatgaatatgcggttcgagttctctgggaatcccgtcagatatggctgcatcatggccgggtcaggcctgccggtcaggccgacttggcacccactacgccaattcgccctgctgcgcggccgcggcgggcgcagaggcctgcatcgcatcggtctcgccacgaatgaacgcgagcaccgcaggcagatcctggggctggacgagcacctgacgggccttcgagccttcggacgggccgacaacgccacgcgactccagcaaatccatgagtcggccggccttggcgaagccgacgcgcagcttgcgctgcagcatcgatgtggaaccgaactgcgtggtgaccaccagctcggccgcctgcagcaacacgtccatatcgtcgccgatgtcctcatccggctcgacggccttcttctcggcctcctgcgccatctgctcgatgtcctcgcggtagtgcggcttgcgctgtgtgcgcacgaactcgacggccttgcggatctcggactcgttcacccacgatccctgcacgcggatgggtttcatcgagcccataggcaggaacagggcgtcgccctggccgatcagcgtctcggcgcccaccgaatcgaggatgactcgcgaatcggtggcggaggatgtggcgaatgccagtcgggacgggatgttcgccttgatcaggccggtgaccacgtcgaccgacgggcgctgcgtggcgagcaccaggtgcacgcccgcggcacgcgccagctgtgtgatgcgctggatcgagctttcgacgtcgttcttggcgaccatcatcaggtcggccatctcgtctacgacgacgagcaggtacgggtacggggcgaccttgcggttcgaaccggctggcgcatgcaccttgcccgcgcgcacggcttcgttgaagtccttgacgtggcggaatccgaagaactgcaggtcgtcgtagcgcgcgtccatctccttgaccacccattcgagcgcctgtgcggccttcttcggatcggtgatgatcggtgtgagcaggtgcgggatgcccgcatacgcgctcaactccacacgcttgggatcgaccatgatcaggcgcacctgctcgggcgtggaacgcatgatgatcgacatgagcatcgaattgatgaagctcgactttccggagccggtggcgcccgccaccagcaggtgcggcatcttggtcaggtcggcggtgacgaaatggccctccacgtccttgccgacgccggcgagcatggggttcgggtcgttcatcgccttgtcggagcgcagcacgtcgccgaggtggacgatctcgcggtcatcgttcgggatttcgatgccgatcgccgattttccggggatcggcgagaggatgcgcacatcggagctggccaccgcgtaggcgatgttgcgctgcaggttcgtgaccttctcgaccttgacgcccgcgccgagctcgacctcgtactgggtgacggacgggccgcgcaggaagccgacgactttcgcgtcgacgttgaactgctggaacgtggaggtcagcgcgcggatcacgcggtcattggccggcgtgcgcacggcatgaggctggccgtgcgacagcatgttcaggtcgggcagttggtacggggcgtccggcgccgcaagcgcagggtcgtccacattgggattcatgttctcgcccgcaccggccgatgcgcccgaggaggcatccggggacatgggggaaatcgcaccggcagtgcccacggcgggcatcgccgcccacggatcggacgtaccggcaaccgtcgatgagaccaacctcgcactcccggccgccccggctcccccgtcgggatccgtcgcatacgccggtacgcctgaggtaccggaagatgcggcaccggggtgtgcggcggccatgccggatgtcatcgtcgcgacggcatcggcggcgtgggccgccgccacgcccccggacatggcgccggcagctgctccggccatcgcgcccatggtggaggacaccgtgcggggcatgacattgccgcgtgcgtccagtgatgtctcggcggcctgcccatgccgactcgccgcgtgggagaacgggtcatcccccgcataccggtcaagtgacgcgtcatccgtcttctccgcggacttgcgccggaacagacgggagaaccatccgcccttcacgtccccggagtccgactcagtttcgtccgtaccgtcatgggcggggacgccctcggcgaacgccagggtctcatcgccgtcacccacacgcacctcgttggggaactgatcctgttgcgcggccgaatccggctcctgccgaggatgcagggaacgctgcgagatcatggcagcgatggtgcggacgcgatccggcacctgagtgacatgggtgcgggtgatcatcagcagcgagaacaagccgaccaccacgaagacgataacggcgaacaccttcgacaatccccatgccaaaggcgagcccagcacgaaaccaagcagtccgccggccctttgcagcaggccgatgtcgaacgaacgcgcgtcggcggccacgaccacgtcgatgatcgagcagacggaccacaacagtatcgcccagccgctcaccacgcgggggttgtcggaattcttgccgctgttgcgcatcagacggatggccacgatcaccagcagcaccggcaacacgacgctcatcacgcccagcacgccggccgagaacgcatgcagcacccggccgatgaacccgttcacgcggaaccattcggaagcgcagaagaatacggcgagcacgatcagcaggaagcacaggccatcccggcgatacacagggtcgaattcacccactccggcaaccgaccgaaccagtgagccgaagccgcgcggaaccgcgagaatgatccgcttccacagcggctcctcgaccggggtgcgggcatcgtcccccatgccgccacgcccgccggaagctctcttcccggtctcgccgccgcgcgacgaagcacgctgcgtgcgggtgccacgcggcgagtctttggaaggaccattgcctgatgaggatgttgttcgtgccatagcgtcttcagattctacccatcacccgttatttcccgatcaattcgcgtcaaaacccgcgcgaggggcatcggcgcatgtaccatctaactatgactccagcagaacgtgcgagcgcagtcgcatttgcactcaaaaactgcgcattggaagcgatgacgccgggcgatgcgacgatgcgcgccgcggcgggatacgagcggggcgacaacgacgtatccgctctgatcgacaccgcggaccgggagacctccgggatcgtcagcggcaggctcgccgacgggagccttgacgatcatgccaccgaccacgccagcagcgtgttcgcccgaacggtgctgttggctgaacgccgttggaatccgagcggcgacattgccgagctcatcgccatccaccggggactgttcgacggcgtgttctccgacgccggacagctgcgcacctcgaacgtcacccgcgaggtcaccgacaagcggcatcaggccaagaaccccgaggcgttctttcccgcgcaattgatcgagaccggcgccttgaacatctcgaccgagcttgccgacaaacgcaacctggacaacctcgaccggggcgtgttcgtccgggagctcgcccacgtctacgacgaactgggctacctgcacccgttcaagggaggcaacgccatgacgcttcgcatcttcgcgtcccgtctcgcgcatgacgccgggtgggatctcgactggggaggcgtgacgcgcgagtcatacaagcaggcgaaacacgccgcatatcgaggtgacatcaacgccttcagccagatgttcgccgacatcgtgcgccccgcgaaccccacgcgggtcttcctgatcgccggctgggagcaggggcccgctcactgaccgaagccgcggcgactctgttgccggtcaccacggggtaccggtcgccacggccgctctgccattactgcaggtcgcccagatgatgttgcgtatactcgtccgcctgcgcatcgatcgggtcgtaatcgcccgcgtcggcatggtcgataacggccatcgcgttatccaccagtcgcggattgagcgcatggagccaatggatgcgcgggtcacgcccgaaccatcccatctgcttgcgggcgagccgtttggtcttctgcgcgatgtctcggaacgtgtcatccagatcgcacagcccgtccaggtaatcgatgacttgctgatagcccagcgcccgcccggcggtcgctcccagatgggggcggatccgctccacctcttcgatgaaaccaccctccagcatctgcttggtgcggatgtcgatgcgctggtccagctcctcgcggggcaggtccagaccgatctgcactgaggcgatgacataccggtagcggggcagactggcggaatacggacgcccggtcacttcgatgacctccaacgcgcggatggtacgacgcgggttgtgggggtccatgcgcgacgcggcctgagggtccttcgcccgcaactcgtcgaacagcgctccggccccctcgctgcgctcacgttcctccagtcgcctgcgcacatcaggatcggtgccggggaacgaaatgtcgtcgatggcggcccgcgcatacaggccggacccgccgacgagaatggggcggattccgcgtgattgcaggtcatggatggtggctcgcgctacctgctggaatctggcgaccgacatggcctcgtccggatcgatgatgtcgagcagatgatgcggaaccgccgcctgctcgtccgcggtcggtttggccgtgccgatgtccatgccgcggtacatctggtaggcgtccgcgttcactatctcggcacgctccccccgttccgccagcgcccgggcgacggcgatgccgaggccggtcttgccggacgcggtcggcccgacgatgctgacgaccctcggcatcgccacggacgggtttgctgaccggccttcggagcctgacgaggccgggccggtcacgttcgacgccatgtcattattcgtcaatttatcggtcatggtcacatcgttcatggtctcgttcatggtctcactcatgatgtcgtctcgcttatatcgcggtgtctgtcccgctcaccggcggaccgcatacgtctggccggcgttgacatccgggtcggcgatgaggttgtggcgaccggcatgggtgacggtcgcggtcacgaaatcaccgatctgcggcatcggctcgccgtccggcacgccgatatgcaccagcacgccggtccgttcacgaccggtgacgcgatgtgtcgcggaatccttcttgccttgggccccggtaatcatcacttcgacgtcacggccctcgaacttggcgagctcctcttccgtgatctgctcctgaagcttcaccagccggtcgaaccgttcctgcacgacctcatgcgggacctgctccatttcggccgcgggggttccgggacgcggcgagtattcgaatgtgaacgccgactggaacctcgcctgacgcaccacatccatcgtcgcctcgaaatcctcgtccgtctcgccagggaatccgacgatgatatcggtgctgatctgcgcgtccggcatcgcctcgcgcaccttgcgcaggatatccaggaacttggcggaacggtaggagcgacgcatcgcacgcagaatcttgtcggagcccgactgcaacggcatgtgcagctggtgcatgacgttcggcgtctcggccatcgccgcgatcacgtcgtcggtgaacgccgccggatgaggcgacgtgaaacgcacacgctccaatccctcgatgtctccgcaggcccgcagcagcttggagaacgcataccggtcgccgatgccgtaaccgaacgagttgacgttctggccgagcagcgtgacctccttggcgccttcatccacgcattggcgaatctccgcaaggatgtcgccgggacggcggtcatgctccttgccacgcgtggtgggcacgatgcagaacgtgcacgtgttgttgcagccgatcgagatggatacccagctcgacaccttcgaagcgcgggcgaccggcagctgactggggaaatagtccagcttgtcggccacttcgacctggcaggtccccgccatgcgggcctgatccagcaggcgcggcagcgagccgatgttcttcgtgccgaacaccgcatccacccacggcgccttctgcgcgatcctcttgcggtcaagctgggccatgcatccgccgatcgcgatctgcatgttcggatgcgtgcgcttgaggtccgcccacaggccgatggtgccgtacatgcgttccgcggcgttctcccgcaccgcgcacgtgttcatgattatcaggtcgacgtccttgtccgccgcctgttcctcggtcgccggcatgtatccgtcatcttcgagcacaccggcgattcgctcggaatcatgcacgttcatctggcatcccagcgtgtgcacgtaaaatacgcccttgccgcgccccgttgtggcgccaagggtcgggtccgtcaatgtggaggtgcgctccgactcggtcatcatgtcttcgttcatagtcaaccatcgtaacgattgcccaagccagcaccagcgtgctgcgatttttcagttcctccgcaagagttcggctatgatggtgaaccgtgatacttgaccgacaaagccgcatcaacacgaatgacctgaaaacccgactcgatgccgtgggcatggaccgggggtctttttcgccggaagaactcaccgaattcgtgaatctcatgcaagtctacgaaggcgcgatgtatgagataagcaccaaactggagatccttgattcggagttccaggtgcggttctcgcatgatcccatccaccacatggaacgtcgtctcaagtcggtgaactcgatcctcggcaagctcaagcgcaagacgctgccggtgaccgtgtcgtcgatcaaggacaacctgttcgatgtggcaggcatccgcgtgatctgcaactatcgcgacgacgtgtactccgtgtcgaactatctgtcggcgcagaacgacatctccgtgctgcgggtcaaggactacatcaagaaccccaaacagaacggctatcggtcgctgcacgtcatctatgcggtgcccgtgttcctctcatccggtgcccactacaccccggtggaggtccagttccgcaccatcgcgatggattactgggcgagtctggagcacgccctgcgctacaagaccgatctgccggacgcaaagctcgccgagcactcgcagacgctgcttgattgcgcacggagcctgcagaacatcgagacccagatgcagaacatccaccgcgacatcaacggcgcgccgcaggtcgaggagacaccgaaagccgactaagctggtcgaatcggcccccgtcacgcatcctccgccctcgctgacgggaacggatccgtctgacggccgatcagcgggattctgtctttcttgttttccggtcgcgttcactgatcccgttttccggtcttgttcaccgccaatcgtctgcggccgacaccgggcatctgcgcgagcacgatgcccgcgaagatcagcgcacagccgaggtatccgcgtaccgtcatcgtctcgcccaacagcaatgcgccgccgatgaccgagaacaccgattccagcgacatgatgagcgatgcgcgggtcggcggcacccactgttggcctacagcctgcaacgtgtaggcgacgccgactgacccgattcccgcatacagcacggcgatccacgcctgccctaccccgttccagtccatggagccttcgatcagcgtgccggcccagctgagtgccgcggtcgtcacgaattggatgaatgacagtgtcagcgcgtcgacgcgtgctcccagcgtatcgatcgacaggatatgagcggagaacaggaccgcggtgaacagcagcaggcagtcggccagcgtcggggaaccgaagccgtccgtgatgcacagcaggtagaatccggccacggccacgcctaccgccatccaagtcatcatgcgcactgcgcggcgaaggacgagatacgccagcaacggcaccatgacgatgtagagcgcggtgatgaatccggcgcggccggccgaacggccgaacatgatgccgtactgctgcagcgtgctcgccgcgaacaggaacacaccgcatatcattccgacgatgagcgggttcgacagtgcgctgccgacgatcatgtcatgttcgtcatcgccggcctcacggttccccgcgccaaccgtcttccctgattcccggcatcgtcgcaaacgcttccacagcagcaacgggatcagcgaaatcgcccccaaggtgaaccgcgtggcgttgaagaacaacggcgacatcgatgccatgccctgcacctgggagacgaacgcgaatccccaaatcagcgaggtcaatacaagacatgccataccggccatttcctgctgcttcatgagcattcacgctagcgtatcgccgtgaccggtcccgaacgatgatggaatggtctcgctgattcgcgcgatgggcatctgaacgatgatggcccatcccgcggctgcgggatgggccatcgcatctgccgtcgtgacaatatccgtattggcggaatcggctatgacggtaccgttccagtgatatcagtctcggctgccgaacagttgaaggatgtacaggaacatgttcacgaagtcgagatacaggttcagcgcgcagatgatggagatcttcttgatcatctccggcccctgggcctcataggcgctgaacagcgcacgggtctgctgagcgtcgtacagggtcatgccggcgaacagtatcaggccgaaggcgcagatgatacgcatcccggtcgtgctgcccggaacgaacatgagcacgatctgggagatgatcagcaccaccaggcccaccatgaggatggggccggccttgagcatgtcgaatttcgtggtcaacgagaacatggtgagcacgaagaagaacgccgcgcacaggaccagggccacgccgatgtcggagatgctgtacaccaggaagatggagctgagagtgaatcccatcagcgccgcgtacacgtagaacatgacacgggcggtcgatgccttgatcttcatgatgcgggcgcccagcgccacggccagcacaacctgtacgatcgcgaatccgaagaagccgatcaggccggttgactcgatgaaggagacgtatgcgccggtcatctgcgcgacgaccgcgacgacggccgtgatgataaggccgagcgtcatctcgccgtatgccctggtgacggatgcccgttgggccgcctgcacctgttcacggctgtagatggtctgggcgttgatcgccgcagtgccgttgggcgcgtatgaatactgtgattgtccgtattgctgctgcccatatgcgggctgctgctgattgccgccgtaatagggatcgccgttgcctggctgctgtccaaatgtcatgctggctcctttgtttgcgtacgcttcatcgtaacggagaaggctgaacaaatcattaatgttcagccttgagcatcacaccagcaacgcctgcctattcgtctatttcaggtcgaacgtgtgcacgaccttccgagagtcatcgatggagaacaggtcggtcacgtcgacggtgatggtcgactcgtccttcaacacgtatcccagggtcacctttcccgtcgctccgggctggatctccgccgtatatgaattcatgtcatatccggtcggctggtcaagatagacggcggtgtccagggcctgtccgttctggaacacctggggatgcgacagcgcggcgaaggagttgttcttgcctgaattgttcttccattcgtacgtgaccatcaccgtaggcttgtcttcatagtcgttgcccgatttcgccgcggagacgatcgtgacatggaggttcttgagatcaccctcctggtcctgctcccccgatgccttggtcgtatcggtggagtcattgttcgtcggatcgttgttcgcggaaccgtcgttggaggaatcgtcgccgctctttttcgcgtcggatgacttgctctgtgacgtgccggaaccgttaatggcctcatcaatggccttgctggctgcggactgcatggccagagtgatgacgatggcgagcaccgacagcaccgccgcgacgatggaaagtatcttgcccgccttcttgccgcggaacgtccccaccatggcgatgatcgccagcaccacgccgatggcgcctaggatggccgctatattgttcacgatcgggataaagctgaggaccagccccaaagcgccaaagacgacgcctacgataccgcagatcgtggttcctttgggggtaccctgtgcggacgtctcccccttgataccgtgcgacatagcattctccttcttgatctcggtgagttatgcaccatccacgctatcggagttcgcacgtttgcatcagtggacgaacgttcatttccgattgccctttcgggcagataagaatgaacccgcgttcgatggcgcggaaagacctgaccccgtagagtggatgccatgaatgatttctcgccccacccccgcgcgggaggaccgctcccggcgacgacgtccgacgaggacaccgtcgccgtgcgcacgcgcgtatggtgcaccgcagcgatgatcaccgtttccgcgttcatgtgcctggtgcagacttcattcgcagccacccggtacatcaataatccggtcaacgccatgtacgtctggttcatcgcgagttccctactggccttcgcgttcccgttcctgctgcttgcacgcgacaagcacccggaaccggtgttctggatctgctgcgccgtcatattgatctttccctatgatccgatgctgatgctgatggcgctcacatcgctgatcgcaagacgccgcggcaggcagcgcatcatccgtgctatcgtcgcggcgacgctggtcggggtctgggggcagatgcgcgacacgttgcgcccgttcaactcctcgatgtggcaatcgaccatcttcatcaagccggattcggatgtcgcctcgggccatgccgtgatgcttgaggggaggccgaccatcatagccacagccgttgtggtggagctgatagccgtcctcatcgccattctggcgggactgtatatccggtcacgagtgcaattggacgaggccgctaccaagacccaggccatcagcgattatgcggtgagcctgcatcgcaatctcaccgatcagcagctggccgacgccatcgcagccgaagcccacgacacgctcgctcattccttgtccctcatcgccttgaacgccagtgccctgcagggcgaggcacgggcgttcatccagcttgccgatgcgacgaacccacatgagacggggcagacgctgacccccgaattgcggaatcaggcttcgcttatcgaggagaaatccgaggagattcgacggcaatccgcaggagccttggatgaggcgcattccatcatcggcatgctccgtcacccccaacaggcacgtcagcagctcgctcccgccccgcaaacgtcaatgacacgccagtcattggacgccctgatcaacgatgcgcgctccgccggcatgcgcatcaacacctggatagacatccagcagctctccgacctcgatgagggcacagggaaaatcgcataccgagccatccaagaggggctgaccaatgcccgcagacacgccgagggtgagccggtgtctgtggaagtcacgatgaaccccggcaacggcatccgcatccacatcagcaatcccatgaagcgcggtctctccgccccgaacgagcgcgaggtcccatccgcaacggacggcaacggacttgccggcctgacggcacgggtgcagacggccggcgggacatgccgatacgggcacgacgaccaccatgtcttccatctcgacgtggcaatgccgtggatcgcctgtcaagcctatagaatgaagccgtgaacgattccgaacagcacgtcatcaccgtgagcgtcatagacgacgatccgctggtgtgccaggcgatgagtatgattctccgcgattactcgcaggggcgtgtctctgtcgtctccacatcaaccgacggagccaccgccgtgcgaaacgccgacagcgagcacccggacgtcgttctcatggatgtggcgatgcccggcatcgacggcatcgagaccacccgtcgtcttcgcgcgcttcgcaatcctcctcacgtgctgatcctcacatccttgaacccgtccaacacggtagaacgctccgtggaggccggcgccgagggattcgtatccaagaccgacgcgccggaggacatcatccgccgcatagtcggcatatgcgaggggaccccgcagttcaatccggccagccagagacagctcatcaatgatctgagcatgcagcggccccagtccaggcgtgacgaggctcgggccatgctggacacgctgccctcccgggagcgcgaagccgtgctgctcgccgccgaaggctgcaccaacgccgagatcgcaggacgcatgttcatatcggaacgcaccgcgaaagcgcatctctccagtgccgcggacaaactcgacatggggcgcgtgcagatggcacggcttgtcgaacgagcggacctgtaacggcgccgtcacgcaagccgccgccagcgcatccataccgacccgctggtacgctgatgctcagcagctaccgatgagggggcgtcatggcaatcaacgcgacggaaaaaccactgggcaaggtgttcactccggactatcagttgtccatcccatccttccagcgcgcctatatctggaaaccggagaacatcctgcagctcatcagcgaccttgaggaggcatgcaaatcaccggagacgccgtatttcctcggttctctgattctcgtgcgggaaggcgacaccagcttctcggtcatcgacggccagcagcgtctggtctcgctgtcaatcatcatcgccgcgctgcgcgacctcgaacatgacgaggaatggatgcgtctgctggacgctctgatcgtcgagcccggagacaagctgcgcggcatcacctcgcagccccggctgacgctccgtgaacgcgacgccgcatttttccgcgaatacgttcaggaaggcaatctggaggcgctgttcgacatgaacgatgaggactgctcctcgaacgcgcagcgcaacatcatcgccaacacaaagcaggcatacgatgcattggcacagcttgacgaggaggaacgccaccggttcgcatcctatctggtcaattcggtgaccttggtcatcgtcaccaccgatgaccttgatggagcgcatcgtattttcgacgtcatgaacatgcgcggcctccccctgacgccatcggatgtgttcaaggcccgggcgatgtcaggactgcccgccgccgcggtggacgcgtacgcctcccgttgggatgacatcatggatccgctgggcgatgacgccgcccgcgtggaggagttcttccggtatctgcatctcatcctcacgcacaagcccgcgacgggcaaactgatcgaggacttcctttccgacgtgctgaaccagtatctcgccggtcattccattgaggcgttcatcgacggtgttctcgccccgtatgccatggcgtggcgcattcttgagcgcccgtcggataccgtgctgccggatgatgttcgaggcaggctggaggcgctgaacgactatcggcatcatgagtggaaagccgtggcgatgtgggcgctgacgcattcgttcaggaacctcggcgaccccgaggtctcgttcttcgcccaacgtggttcgcattcggcacgggactgcggcaggacggccgacccgttggggtcgcatgaccgacagcgcttgggcgagattctgtgcgctttggaacaggtggccggtgtcgatacgctgaatcgtcggagtgccattgaccgtcgtgggcacaccgcagctgcgatccgcgatctggataagggattccctgttcgcttggtacgcggactgtccgtcagcgccgccgaccgggcaggtgccctgatcaggctgcacggcgagttgcagggagaccctgatctggtgcgtctgctgttggttcgggccaacgagcagcgtgccggggctcgcattccgcgcccgcgtgcgctggcggtcgtaccgatcatgcctctggatatcgcgtcgacggcgtcgttctcttcctggacggcggacctgcatgactattggatgtatcgtctgggcaatatggtgctgatgcaaggcaaggaggggcagatcgaccggctcacggagtacgggcgccgtcgcgaccgcgtgctgctgcgtgccgactcctgccgtttcccgctgaccaagcagattgccgacttcaacgaatgcacgccggcgatgctggaataccggcagaaggagacgattcgcctgcttgccgaatactgggacatccgttatgacgagagccatgccgatctgacgagcaaacccccggagcagctttccggcgacgcaggctcccggcagacgcgcggttcacagcgtgtcaccatcaagcaggtcgtcgccgccggtctgctgattcccggcgagaccttggtatgggagcgaccgcgcaagggcgaacgttggctggtgaccgtgacccaggagggacgcttccgtcttgaggacggctcggaatatgcgtcgcccacggccgcggcacgcgcggcaggcggtcgcagcgccggattggatgtgtggaagcgtacgtcgaacggcgaaaaactcagcgatatctggaaagcctaccgtctgcgcacccgctagacgcctggctgccagtccacgaccacggcacttcgacaagtccgccattcccatatccctcacccggtcatggtcccacatcagacgacataaatggaactgtggacggatggaagatgatgcgtataccgaaaaagtcccatcgcagggtatgcggatgggactctggctggataaggggcgcataaaacagcggcaacaaccaacggcaacggtccggcagtcagatgtgccgctcggcggtcactccgtgatgccgtattcggaggcgatgacccgccacaggtcctccgccgccttatcgacatcatcattgacgatggtgacgtcgaattcgttttcggcggagagttcgacatgagcggtttccagacgcttggcgacttcctcgggagtttcggtgccgcgtcccttgagccggcgaacgagctcgtcgaagctgggcggggcgatgaacacatagacgacttcgagaccgagctccttggcacgctgcttgacgcgtcgggcaccttgcaggtcgatctcaagaatggtggggacgccttcggcgaggtgttcctgaacgggcttgaggggcgtgccgtagcgggccaggccgtggaccgtggcggtttcgagaaaatcgccggcctcttccttgtcggtgaactgctggtcgtcgaggaaccagtagttgacaccattgacctcgccgggccgcggcttgcgggtggtggcggacacggagacccagacgccgggatggttcttgcgcaggatgttctcgacggttcccttgcccacaccggcggggccggtgaggacgacgaggcgcttgcgaggtgtgccatcatcgtcgggagtggccgctggctcggccggggtctgctgcagtgatgcggtaatggttcccataccgtctttctccttgtcctcgccttctttcatggcttcgtagagcgcctgccggacgtcgatggcgatggcctcggtggcttgggcaagcgcggaaatatcgggcccatgggcggcgatgaaacgggatacggtcaccagaacgttgcccttggtgcctttgaagacggttttgaggtccttggcctcggcgccctgccagccgtagcccggggaaaggatgggaccggtgaatttcgccgggtcgacaccgctgtcggcgatccactggcctatggtggcgccgatgatgagcccgaccgagcccataccgtcgatgtcgtcattgaacttctgggcagtgctggcgatgccgaacgccacggttttgcccttgaagtcgccgctctggcggatggccgtctgcatgctggcgccttcctgattggaggtcagggaggcgatgaagacgccgcgaccgttgttgagagcctcattggtgaggccccgcagtgagcgtgcgccatagtacggcagcagggtgatggcgtcggccagcagaggggcgcccggcttgaagtatgcgtccgcgatggcggagatggtggtggacaggcctccatggaggcagtccacgatggtgatgatgcccatttgacgagcggcgtagagcactcgttcgagcgccgcgaatcccttggacccgtagcgctcgaacatgggctcctggaatttgacagcggcggcgcggtctcgcatggcctgaagcatgcgcatggagaacagctccgcgccttccgcgtcgacgttatacccccagtcagtgaggtttttcctgtgcgggtcgatgccgacgcacaaggggccgtactgggccatcgaactgctgaggcgcagtccgaaatccgaccgcatggccttgatttcttcctcactgctggcgtgtgtcatgattgctcctggcctaacttattcctggctctccaactcgaacagctgcttggcgtgctcctggatgctcatgatctggtaatcgttgtgcttgacggcttcgatggccatcagcacggcggagaactcggtcatggtggtgaactggggcaggtcggccgcgatggccgcagcgcggatggaatatccgtcggaacgcgatccccgggaattcggcgtgttgaggatcatgtcgatcttgccttcttcgatgagctcgaccacgttctttccgatgccaccgacggcgtgctcgaccttgacggccgcatccgggtcagagtcgacgcgggtgctgatcttgtcgacgatcttcgagtcgatgccgtaacggcgcagcacggacgcggtgccctccgtggcccagatggagaatccgagctcgaccagacggacggccatcagcggcagctgccgcttgtcggtgtcgttgacggagatgaagacgttgccgctggtaggcagtccgccgtcgtatgcggcgagctggctcttggcgaaggcgtgcgggaagtcacggtcgaagcccatgacctcgccggtggagcgcatctcgggtccgagcaggatgtcgacggtcttgccgacgggcgtgcggaagcgcttgaacggcagcacggactccttgatggcgacctgctggccacggtggatgtcaccgccgtcgcccttgggcagcagcaggccgttggcccgctgatcggcgatggtttcccccgccatgatgcgggcggccgccttggccagggccacgccggtagccttggatgcgaacggcacggtgcgggaggcacgcgggttggcttcgatgacgtacagcgtgttggccatgaaggcgtactgcacgttgatcaggcccttgacaccgcagcccttggagatggcgtaggtgccttcgcgaaggcgacggatctggtcgtcggacagcgtgctcggcggcagcgtgcatgcggcgtcgccggagtgcacgccggcctcttcgatgtgctccatgatgccgccgatgtacagctcttcgccgtcgaacagggcatccacgtcgatttcgatggcgtcctgcaggaacttgtcgatgagcagcggggagggcaggcgtccggacacgaccgtgtcggccttggcctcatcgagcgcacggttgacgtacttggtcaactgggcgtcgtcgtagacgatttccatgccacgtccgccgaggacgtaactggggcgcacgagcaccggatagccgatgttgtgggcggcctcgcgggcctcttcaagcgacagcgcggtgccgtagcgcggcgcgttcatgtgctcgcggcgcagcacctcaccgaacagctcgcggttctcggccaggtcgatggactccggggtggtgcccaggatcggcacgccggcggccttgagtcgcgcggccagcgacagcggcgtctggccgccgagctggacgatgacgcccttgaccgggcccatcttcttctcggcctcatagatctccagcacgtcctcgaaggtgagcggctcgaagtacagccggttcgacatgtcgtaatcggtggagacggtctcggggttgcagttgaccatgatcgtgtcatagtccttgccgagctcctgcaccgcgtgcacgcaggtgtagtcgaactcgatgccctgaccgatgcggttcgggccggagccgaggatgatgacagcctcgcggtcgcgcttgcgcagctcggtctcgtcggcgtagcaggagtagtagtacggcgtgaccgcgtcgaactcggcggcgcaggtgtcgacggtcttgtagaccgggcgcaggccgtaggtccagcgcagctcgcgaatcgtgttctcgccctcgtcaccgagattgcgcaggtgggcgatttgcaggtcggacaggccggcgagcttcgccttcttcagcagcttggcggtgagtttctcggcgtcgcgcacttccatcgcggtctggttgatgagggccagctgcttgacgaaccacgggtcgatcttggtggcgtcgaagatctgccgttcggtggcgccgccccacagagcgcgctgaatctgcagatagcggtgctcggtcggcacggtgatggccttgagcagttcggcgacctcggcttcgtccggcttgtcaccatcccagctgaagcccatgtggcgcttgtcgatggagcgcatggccttgcccagcgactcctggaagttgccgccgagtgccatggcctcgccgacggacttcatcgacgtggtcagacgcgggtcggcgccggggaacttctcgaacgcgaagcgcggcaccttggtgaccacgtagtcgatggtcggctcgaaggaggccggcgtggactgggtgatgtcgttgcggatctcgtcgagggtgtagccgagcgccagcttggtggcgatcttggcgatcgggaagccggtggccttggatgccagggcggaggaacggctcacgcgcgggttcatctcgatgacgatgatgcggccggtgtcagggtgcacggcgaactggatgttgcagccgcccgtgtcgacgcccacgccgcggatgatggcgatgccgatgtcacgcagcttctggtattcgcgatcggtcagggtgaagcagggggccacggtgatggagtcaccggtgtgcacgccgaccgggtcgacgttctcgatcgggcagacgaccacgacgttgtcgttgcggtcgcgcatcagttcgagctcgaattccttccagccttcgatgccctcctccagcagtacctcgtcggtcggcgagtaatgcaggccggcgccggcgatgcggtgcagctcctcctcgtcgtgcgcgatgccggagccgaggcctcccatggtgaagctcgggcgcaccaccaacgggtatccgagttcggcggcgacggcgtccacttccttcatggagtgggcaacttcggagcgcgcggattcggcgccagcctcgtcgacgaccttcttgaacagctcgcggtcctcgccgcggtcgatggcgtcaagggaggcgccgatcagctcgacgttgtacttcttgagcacaccggcctcgccgagcgacatcgcggcgttcagtgcggtctggccacccaaggtgggcagcagggcgtcggggcgttccttggcgatgatctgttcaaggatgggcgtggcgatcggctcgatgtaggtggcgtcggccatctccgggtcggtcatgatcgtggccgggttggagttcacgaggatgacgcggatgccctcttcgcgcagcacgcggcacgcctgggtgccggagtagtcgaactcggccgcctgcccgatcacgatcgggccggagccgatgaccatcactgacttgatgtcggtgcgtttaggcattgcggttttcctccttggacgtcttcatcagatcgacgaaacggtcaaacagatatgcggcgtcgtgcgggccggccgccgcctcgggatggtactgcacggagaacgcggggatgtccacgcactgcaggccttcgaccacgtcgtcgttcagatcgatgtggctgacgaacaccttgccgaagtgcccgttgtcgaacggggcgtcgacggtctcgccgataggcgcgtcaaccgcgaagccgtggttgtgcgcggtgacctccaccttgccggtggtcaggtccttgacgggctggttgatgccgcgatggccgaacttgagcttgtaggtgccgaagccgagtgcgcggccgagcagctgattgccgaagcagatgccgaagaacgggtagccggcgtccaggaccttgcgcagcagctcgacctcggggtcggcctgctccgggtcgccggggccgttggagaagaacacgccgtccgggttcagcgcggtgagttcctcgaaagtgatggtggacggcacgacgtgcacgcggcagccgcgctcggccatgcgatgcggggtcatgcccttgactccgagatccacggcggcgacggtgtagagcggctccttgccctcgtactcgccacacggctcgaccgtatacgtctctttggtgctgacctcgtcgtacaggctcagacccttcatctgcggggtgaccttgacctcgtcgatgagcgcggcgacggtcttcaggcgccctgcgtcgtcgagcagcgcgtcaccggagaagattccggcacgcatgacgcccgcggagcgcagatggcgcaccagcttgcgggtgtcgatgtggctgatgccgacgatgtgctcggcgacgagatcgtcgtcaaggctgcccgtggcccgccagttgctgacggtggggctgggatcgcgaaccacgtatccggccacccagatacgggaggattccggatcctcccggttgattcccgtgtccccgatgtgcgggaacgtctgcaccacgatctgccgatcgtaactgggatcggtcaaagtctcctgataaccggtcatgccggtcgcgaacacgatctcgccagtggtcttgccgatcgcgccgtaagagtcacccacatacacttgcccgtcctcaagtacaagcacggcgtcatcaggggcaaaactcacggtttcggaatcaatctggttcaccaaaacccccttattttctcaggatattcgtaccaaccttaactgtcggcggggacgcgccccaccggcaattcggctggtttctcgtcatttacttgtggactcgccgtcctgctggccggcttgtggatcggccgtctgctcggatgcagcttcggcaacgtcatcggatacatcgtcgaacgtcatgtcgtcgaaatcgacgccgtcggcgatgtcatcgtcctcggacgcttcggaatcgccggtttcggcttccgcatgcgacgcttcgccggcaggctcaccaggctcatgaccgtcgtcgctcgactgtgcgtcgggctcgtcgttttcggggtggagaatggcctcgcgtccttcggtgtcatcgcaaatcgcgctgagcaggccgtggatgaacgccggggagtcgccgtcgctcaacgtcttggccaggccgagcgcctcgtcgatggccacgcgatcgggcacgtcgtcgttgaagatgatctcccatgcggcgatgcgcaggatattgcgatccacgacggccatgcggcgaaccttccacccggtggaatgctcgttgagcatgtagtcgatctcacgccggtgatcggcgacgccgcgcacgatctcgatggcgtagtcgggaagcggggtctgcgcaccaggctcttcgatgcgctcagcaagaagggacaggaaatcctgtcccttctcgtccgcctcatacaacgtgttcagagcccttttgcgagcggtggaacgtgccatggaagcctgttgtccttactctcagttctcgcggccgaggtaggagccgtcgcgggtgtcgaccttgaccttctcgccttcgcccacgaacagcggaacctggatctcggcgccggtctcgacggtggcgggcttagtgccggcgttggagcgattgccctgcaggccgggctcggtgtgggtgatggtcaggatcacggaggccggcagttcgacgctcagcggggtgccgtcgtggaacgacacgacgcagtcggtgccttccagcaggaacttggcctgatcgccgacgagggtcttggggatgtagacctgatcgtaggtggtcatgtccatgaagacgaagttgtcgccgtcctcgtaggagtactgcaggttgcggttgtcaacggtctcgaactccatcttcatgcccgcgttgaaggtcttgtcgacgatcttgccgctcagcacgttcttgatggtggtgcgcacgaaagctgggcccttgcccggcttgacgtgctggaacttcgtgacggtccacagctggccgtccaggttcaggacggatccgttcttgatgtcattggtagtctgtgccacagtaactcaccttttcatgttttcaatttcggcaaagctcaaaaatagccttgtctattatgccataccgtctatacagcgcgtcgcggccgaacaatcccccaatggcatcttccggctgcatcagctgttcctcatgcaattgaaacggaacaagcaatagtggttaacgacaattcacctaatgacttagtagctgaataacgaacataataatgacaatgacgacatgtcggctgaaccgataggagacaaccgacatgacgccattctcacgtaatcaatcgatgcagtttatagtgttgatgcaaagaacggaatcaagcatgtggtctgaaacacgagcctgcggcgcgaagatacgcgtcgcgcgctcattgacgtctggcagtaattctatgcacaggcaatgcttcgcctcaacatatccttcctgcctagtcgacttacttggtaacgtctcgacttcggtatccataatcattcgcctcctttcactaacatagtgttgccgcatttattacaccgctgtgtttacaggcaaccagttcccggccttcttctggaagttacatgtctcgcttcctcctcgcgactacgaaagacacattcaatcaatagttgacttcctggtgatgagaaaagccgatttcaaattgccggatatgacgttccctcaaatactattcaacagcaattggaatcgtgcatacaatatctgacgttcaaaagggaagccctcatcccctatgggtggaacgatacagcagagcatcctgtatatggagatgacgtcaacagtctcttcgatgtaatcgaactattcatatcaacagaaagcagaaaaaaccgtgactgaaaaacgtcaggaaaaagaatcaacaatctcaccatggagggtgagggattaccggtcctggttcgtggctgacactgcgtcagcactgggaaccacaatcggcggatttgcgttcacgctggtggcatatgcggtaagccatgatgtaactacggcaggtatggtcggcaccgtgttcgcactgtgcgaaggtttgggaacacttccaggcgggcacctgtcggatagaatcgatcgcaagaaactcatgattgttttcggtcttatatcggctgtaacactgtgtgtgatgacatcggccctggttgcgaaaatgatgtcggcccctttgctattcctgtttgccattgtacggggactcacttccggtgtgttttccaatgtgtccaatatcatcttgcctcaaatcgtcaccgggaatcagctggtgcaagcctattccgcgaatgaatcgcgcgatgcatgcatccaattgttctccaaaccgctgtcagggttcctgtacggattaggccccgagattccattcctgatcagcgccgtcctgtatgcgctgatgtccgttgcgactccgctgattcgttcggatctacggcccaagaacgacgcctccccatcggattccgatgattccacgaagaaaacaccacgaaaccacattggcggcagttcatcgcattcatcgttgatcgaaggctttgcatggtacacgcgatggccacaagcagtatccgtattcagcagtgtgctcttgttgaattgtgtcctcaccctgatggtcagcattgtgattctgaatcaacagatgctgaacattcccggctggcagattgggctcatctcaaccggaagcggtgtcggactgctgagcgggtcgtttctgaccactccccttgccaaccgtctgacgggaggcagaacagtacaagtctccttcatcatcatggtaggatgcgctttacagccattcacccagaatacatatctactggccggatgcatggcgatcatgaatctcatggtcgttcccgccaattccgtccttggtgcctacgcgtcgctgatcattccgaatgatttgcgtggccgcgtgttctcagtgttctccttgtttaacatcacgcttgcctcattggcgtccggtattgcgggaatcatgctttcctctctggggtacatgattgcggcggcgaccaccgccgcaatcatgacaggtaccgtattactggccttcatgagtaacggtattcgtgaaatacctgacaaggcggctttctcgaaccttgaaccgtggcgctgactactctcgcgatatccgcagccgcctacccgcaatgaggacgagccccgacgtgagagtcacagccgcgagcatgaagaccgccgtcacggccgcgcccgtgtgagccagccggacggtcgatccgcccagacccgcacctgaaggcctctgaatagttgcaccatgctgctgcccatcgccgttgctcgggtcggcgacaaacactgaccggtcgatctgcacgttgacgattcgcgtcgtctctgtggtgtcgaagttgttgtcggtgagcaggctcagatcgagccggccattgtcgtccgtatgggtgatgaccagatcctcgaagttgtcaagcaacgggttggcgtccatgtattgcgcattcggcttgaactgggcgccaagggtcagcttgccgccgaaatcggcgagttccgtgaccggcaggaacgacgagtcggcgctcttcgacagcgacgcgacatcggagacgtccggggcggctgcgatgccgtgcgcatacgcaagctttatgccgtacccatgggtctggtcccaggagcgttccagcaccaggaatccgtcctcgccaatcgccgcgaactcggtgatgcccatgttcacgtcggcggccttgaacgccacctgcttgacaagcttccactgtcccttggcgcctttcacgtcgtcacggtagaccagcgcgcggcgggctgtggtggcgatgtccttgccgctgggcgaatcgttcttgagggcgtactcgttgccgaccacgatctgatggccggacggcgataccgtcagcgcttccaggctcttgttgtgcacggcctgtcccctgcagttgatgtcgaacagttcaggcacgggcaactcgttcttctgacggccgtcgatgccgaagatacggatcttcggctgctcatgctcgccttccgccgcgttcggatggccttcggaggtgagcaggaagtcgccgttcggcagcacgccgagcccctcatcatcagtggtttcgccgttgtatggcgtaccgttctcatcggtcaggacgatgctgccggtcggagccgccttgtcgagatcgttgcccagcagccataggcgagcgacatcggtaccatgattgtccattgcggacacatattgtccgagcttcctgttgtacgccgtcgaggacagtccgccgaacgctatcggctccgacgtgccggtgccgtcgctgaatccgttagccgaccagtagtcaaggcgatcgtttctgccgagtgccgtgacgtactgtgacaggcgaccgcttgccgagtcgtcgaatcctgccgccgtcttctggaacggttccgcttcgacatcgaggatgcgcgtggtctgggtggcgctgtagttgtcgtcgctgatgatggagatagcggccttgtattcaccgtcaccgcgataccacgaggcatcgggagtggcgagctggtcgaggttcgtgatgacgagcccttcgtagttatccatcagagggttcgcctgatgagcgccgggtttcgcggaggcgcccagatccggcaacttgtccagctcgccgatctggcgggatttcacgaactcggatgcattcttcgggtcgttgaggttcgccacaccggaaacatccggcgcgccattcagcccggagacgtacgagagtgccaccttgttgccggtctcgctgttccatgaacgttgcaggacgtacagggagtcttcggaatcgaggacgatatcggagatgtccagtcccggtaccgtgtggaagcccacctgtttgacgagcgtccactggccggccttgcccgtcacatcgtcacggtatacgaggaagcgccgcgcgtcgctccggttctagtagacgtcagacttgagcgtgccttccatggccgatacgagttcgtgccctgtcggagacaggctcaatccttccagcgtaaggttatgcgacgcctgacccttgggcgtgttgatgtcgaacagctgcggaacctcaagctcccccttctgccgcccattggcgtcgaagatcctgattgtcgggtgttcggcctgattcctgcccgcagggggaatgccttccgagctgatggcgaaatcgccgtcgggcagcaccgctatgccctcgttgtccgtcgtgttgccgttatagggcgtcccattaacatcggtaaacgtcaccggatcacgcgtgatggacgggttgtgcaggtccttgccgaggaaccacacccgagattcgtcactcccatggttgtcggattgcgccacatatgaatccgcggttttgtcccacgtgagacccgacagtcccccgactcgaatccccttgtaatcgagcttgtccagcgcatcgttgtaggcaacggccttgacctgattctgtgcgccaatatcagtcgtgccctcggctgataccgctggaatcatgacggatgcgaacagcatgcatgtcgtcgccgtcaccgcggctattctcttgttcatggttttcccttccgaacgttaccgttcacatggccatgctggctctgcaaggtatcgggaaggggaataatcacgcgtctgcagatgaacgatacatgaaaagacggcgacatcgttgtccacctgtatggaattcgcctgtatgggtccctggaatacgaaagtgggtcctgaaacctcaagcaaggtttcaggacccactcagaacgctagttcaagcgtgtcgagttcttcgctgatgggaatcaggcgaggatcttggtgacacggcccgagccgacggtgtggccgccttcacgcacagcgaaggtcaggccctcctccatagcgatgggctgaatcagctcaacggtgaaggtcgcgtggtcgccaggctgaaccatctcgacgccttccggcagctcgatgacgccggtgacgtcggtggtgcggaagtagaactgcggacggtagttggagaagaacggcgagtgacggccgccctcgtccttggtcagcacgtagacttcgccctcgaacttggtgtgcggggtgacggagcccggcttggccacaacctgaccacgctcgacgtccgtacggttgatgccgcggagcagcagaccggtgttgtcgccagcctcgcaggcgtccatggtcttgtggaacgtctcgatggaggtaacggtggtggtctgggtcgggcggatgccgacgatctcgaccggggtgttgacggccagctggccacgctcaacacgaccggtgacgacggtaccacggccggagatggtgaagacgtcctcgataggcatcaggaacggcttgtccaggtcgtgaaccggggtcgggatgtactcgtcgacggcgtccatcaggtccttgacggtctggacccacttgtcgtggtccggagcgtcatcatgcagagcgccgtaggcggaggtacggatgaccgggcagtcgcggtcgaagccgttctcgtcgaggaggtcacggacctcttcctcaacgagctcgatgagctcctcgtcctcgaccatgtcgcacttgttcagggcgacgaggatacgcgggacacccacctgacgggcgagcagaacgtgctcgcgggtctgggccatcgggccgtcggtggcggccacaacgaggatggcgccatccatctgggcagcaccggtgatcatgttcttcacgaagtcggcgtggcccgggcagtccacgtgagcgtagtgacgcttcgcggtctggtactcgatgtgggcgatgttgatggtgataccacgctgctgctcttcgggagcggcgtcgatctggttgaagtcgtactcagggttcagatccgggtactcttcgtgcagcaccttggagatggccgcggtcagggtcgtcttaccgtgatcgacgtggccgatggtaccaatgttaacgtgcggcttagtacgctcgtacttttcctttgccatgtaattgtcctcctggacgtctcgtgtagttggcttgcgcttgcggcacaagacactcgctacattgtactgggtttctgggtttcttgccactttggagccagaacccagtcagcggtatatgattttaccgctgactggagacacttacggcttcaaaacagctgcgcgtgtcactccccgcgctgggccttgatgatctcgtccgagaccgacttcggcacctcggcgtaagagtccatctgcatggtgaacatggcgcggccctgggtcttggaacgaaggtcgccgatgtagccgaacatctcggacagcgggaccttggcgtcgatgaccttgacgccggtggcatcggtcatggactggatgttaccacgacgctggttcagatcgccgatgacatcgcccatgtactcctccggagtacggacttcgacggccatgatcggttccaggatgacgggcttcgccttgggagcggcttccttgaacgccatcgaaccggcgattttgaaggccatttccgaggagtcgaccgggtgcatctgaccgtcgtagaccgtggccttgacgccgaccaccgggaagccggcgagcacgccggattccatggcttccttgacaccggcctcgatgggcccgatgaactcggcgctgatgtggccaccagtaaccttgttctcgaactcgaaggtctcgccggcctcggtgtcgaggggctcgaagttcatgaacacctttgcgaactggccggaaccaccggtctgcttcttgtgggtgtagacctcgttgagcacgggcttgcggatggtctcgcggtaggcgacctgcggcttgccgacgttgcactcgaccttgaactcgcggcgcatacggtcgacgatgatgtcgagctggagctcgcccatacctgcgatcagggtctggccggactcttcgtcggtggtgacctggaaggtcggatcctcgtcggagagcttcgcgagggcgatgcccatcttctcctggtcggccttggtcttcggctccacggccacctggatgacgggatccgggaaggtcatggattcaagggagatcggggccttctcgtcgcacagggtgtcaccggtggacacgttcttcagaccgacgaacgtgtagatgttgccggcttcggcggcgtcgaccgggttctccttgtcggcgtgcatctggaagatcttgccgatgcgctccttcttgcccttggtggagtcgagcacgttgtcgccgggcttgacggcaccggagtagacgcgcacgaacacgagcttgccgtagaacgggtgggtcgagatcttgaagaccagggccgcgaacgggtcggaggtcagcggcttgcggtcgatctcgacagactcgtcgcccggcttgaagcccttgatggacggaacgtccttgggagacggcaggaagtcgatgacggcatcgagcatcggctgcacgcccttgtccttgaacgcggaaccgcacagaaccgggtacgccttgcgctcgatagtgagcttgcggataccggcgcggatctcgtcctcggtcagttcgccggactcaaggtacttctcggtcagctcgtcgctggcctcggcgacgtcgtccagcagctgagcgcggtattcctcggccttgtcctgcaggtcggcggggatgtcgacggtgtcgtagtgggcaccctgatcggtggagacgtcgttccagacgtacgccttcatgcggatcaagtcgacgacgccggcgaagtcgttctcagcgccgatcggcagctgcacgacgagcggcttggctccgagcttgtccttgatggtctgcaccgagaagtagaagtcggcaccgagcttgtccatcttgttgatgaagcagatgcgcggcacgccgtacttgtcggcctgacgccacacggtctcggactggggctccacgccttccttgccgtcgaagacggcgacggcgccatcgagcacgcgcagggagcgctcaacctcggccgtgaagtccacgtggccgggggtgtcgatgatgttgatctggaacttttccttggtgtcgtgggactgacggttccagaagcaggtggtggcggcggactggatggtgatgccgcgctcctgctcctgagccatgaagtccatcgtcgaagcgccgtcgtgggtctcaccgatcttgtagttcttgccggtgtagaagaggatgcgctcggtggtggtggtcttaccggcatcgatgtgtgccatgatgccgatgttgcggatcatgcgcagatccgtaagcacgtctagtgccattgctgttccttgctctcgatctcgaaattaccagcggtagtgagcgaaggccttgttggcctctgccatcttatgagtatcctcgcggcgcttgacagaagcaccgaggccgttggaggcgtcgaggatctcgttggcgagacgctcggccatcgtcttctcgcgacgggcgcgggagaagtcggtcagccagcgcagcgacagcgtgttggcgcgggcgggcttgacctcaaccggcacctggtaggtggcgccaccgacacggcgggaacgcacctcgagggacggacggatgttgtcaagagcacgcttgagaacggcgaccggctcctggtcggtcttctccttgaccatgtcgagcgcggagtacacgatgtcctcggcgatcgacttcttgccgtcaagcagaatcttgttgatgagctgggccacgacggtcgagccgtagatcggatcgggcagcagctggtgcttcttagcaggtcctttacgtgacatttctcttacttcgccttctttgctccgtacagggaacgaccctgcttgcggtccttgacaccctgggtatcgagcgcgccacgcacgatgtggtaacgcacacccggcagatccttgacacggccgccgcgcacgagcacgatggagtgctcctgcagattgtggccttcgcccgggatgtaggcggtgacttcgatgcccgaggacaggcgcacacgagcgaccttacgcagagccgagttcggcttcttcggggtggtggtgtagacacgggtgcacacgccgcggcgcagcgggctgcccttcagagccaaagtcttcgacttcttcggctttgcctgacgtcccttacggacgagctgttcaatagtaggcaacttgaattctccgattcagtggtttcttccttttcgtgaagccgccgcactgcagcccacgcccacgaccatgaatcgtcataagcagccacagtccaccggcccgatggcccgtatctctttcacagtccgcattgctgcgcgcgatccaatcaagatccgggatatcccagcgcgtgctcctatcacataaggcgcaccactggcacacacaagtatctatattacttccaccgcggacaacgacacgcttgtcgtgacggcagacaagacaggcagataaacgaaaaccctccgcatgggagggttttcagtggggtggataacgcggcttgaacgcgcgaccttctgaaccacaatcagatgctctaccaactgagctatatccaccatgtgagtcattccagcgaactggattaacgcaacagagggatactatacacgaaatatcaagccgcgtcaccgcggcgtgtcgcgcagccgcccagtatcattcactgcgcgattttgtgcgtttccacctcgacagacgggcgatatgttcacttctgtgcgattttttgggcacatgaaaacacctgcaaacattatgtttttacggctttcaaacttgaacttgttcgtttccataggtataatgaaacacgaaggccggagttgttatcatcaggggaatcctgttgattgcaatgaagcgcacaaagcagtagcgcaacgtcttcacgataattaaataccgaggcaaacagaaacaatgcagcacgcaagcgaagcagtgcgaagcgacacgatgatgagtacgccatcagaagacatcgccatacggcaacgacatcatcgttcggcgacacagtgtggagcgtattacgctgagcagctcagcctgagatatccgcggtagttgtgagccgcagacgggaagagtacaacagcgaagaggcagagaatccgcagagccggcaacgcagctacggccgcagttgacgaggaagcggcacaatgccggctctgctgcaacgtgaccacacctttcataacagaagagactcctttcgcaagggcgccggatgctgatccacatccggcgcccttgtttatggcgcgcggtctgcggaacgcggcctgcgtcacgcggccgtacatgacccaggcgcggtacactcgctacataccctgatgtatccgcaccacgacacagcgcgacaaggagccgacatgctgtctttcggaaacgattattcctatggggcctgccccgagatcctcgaccgtctcgcgcggaccaacgacacggcgttccccggatacggcagcgatgcggcctgcgaagatgccaagcgcaggatccgcgaagcatgcgaggcgcccgacgccgacgtgtggttcctcgtcggcggcacgcagaccaaccagaccgtgatcgacaccatgctcgccccgtacgagggcatcgtcaccgttgattccggccatccgaacgtgcacgaggccggcgccatcgagtcgaccggccacaaggtgatcacgctcccccatcacgcgggcaagctcgacgccgccgagctcgacgactattgcgccaccttctatgccgacgacaaccacgagcacatggtgttccccggactggtctacatctcgcaccccaccgagtacggcacgatctacggcaaggccgagcttgaggtcatcgccgagaccgcccaccggcacggcatgccgctgttcgtggacggcgcacgactcggctacggactgaccgccgccggcaccgacgtgacgctgccggacctcgcccgcatcgccgacgtgttctacatcggaggcaccaaggtcggcgcgctgttcggcgaggccgtcgtcttcaccaagggcaatacgccgaagcattttctcacgcagatcaagcagcacggcgcattgctggccaaaggttggctgctcgggcttcagttcggcacgctgttcaccgatgacctgtacctgcgcatcgcagccaacgcgaaccggcaggcggaccggatccgcgaggcgctgcgcgagcgcggctacacactgaccttcgaggcgccgacgaaccaggtcttcgtcaccttggaccatccgaccatcgaacggctgcaggcccatgtacgcatgggcttcatggagaaggccgacaacgagcatacggtgatgcgcctgtgcaccagctgggcgacgaccgacgagcaggttgaccagctcatcgcgttgctgtgaacagccgcgaggccgacgccgggcctaggccttcgcgtcggcgatggcctcgcgctccatggcgacgaacttcgcgaccgacgcctcgaccgaataatcggccttcgcgtgttcggcataccgtccgccccaaacggccagctcgtgcggatgatcgatccaccaatcgatgcgccgggcgagcatcgccacgtcgcgagccgggaacagggactcatccaacaacgcgaactggctcgccgcgctcaactcggcggatgcgatcacgggcaccagccccgacgccatgccctcgatgacgctcaacgattcgatgtccacgatcgacggatgcacgaacaggtcacatgagcgcagcagcgccggcatctcggcgttcttgtggaacccgatttgcgccttgcgctccagaagccggtcggcgcggaaccgcaggtaatgctgcaacggcccggttccgcagatgatcagttcgatgtccttcgcgtgacggcagcgagaaatcgccttgatcaacgtgatctggtccttctcatgggaaagacgccccgaggcgacgatgcggaacggcaccggcgcgggggctccgtccgaacgctgccgtttgggggtgaaccgcggcacgtagccgtttgatatcacgtgcagcttcgccttgtacccgtgcgcgcgcaactgtccggcgatcatttcggtgggcgcgtggatatggccgatgcgccggtacagccagaagcggaacagggcgtacagaaaacccgacatcccaggcaggtatttcagcggaccggccgaatacatgacattctccggctggaggtggaatcccgcggtcacgggaatacccatgctccgcgcgaccttgtacgcgcaccgcccgaacttgaacggcagatacagatgcacgacatccgctccggcgaacgccgcgcggaacagcgtatcgcttggcttggcgaactgcatctgttgtttggcggccacccaggagaccagcggcaccttgttgacccgtgccggatattcgggggcgccgatgccgacgagtctgacatggtgaccctgccgctccaattcgtgcgcatactgcaatgcggagttcgacgtgccgttgcccttgttgccgatggtgtccatgaccagcacgatggtcagggggcgatccaagaccgacctgtcctgggggcgcggttcttcgttcttgttgtctcgcattgtttcatcctatctcgcagtctcgcgaatcacgaccgagacgcgcacggtggccggccacatgccttcgccgcatgtctccatggccgcgtcctcgttgacgcaatgtactcgcccccccctgaacgttggcccggcgcgggttaaccgcccggtaagaactattgtcacgcgggcggattgccgacgcaagcgtccggtcatacgggaaatctatgaccgcctatcatgacgaacgatgccgacgtccggaggatgtccggacgtcggcatcatttaccgacacgccgttcctcgagccgtgcgatacgtgcccggagaacggtttgccgtcaggactcgcgcctcttgcgccccgtcagcgcgcagccggcggccatcatcgagaccgcgagcacgccaaccggcacgatcgaggcgccggtcgcggcgatggactggttcttgtccttgccggcgttcttgtcggcatccttgtcggtgttcggcttctggccgtcgcccggagtcgtcgtacccggctcgtcgcccggacccggattcgggttgggatccgggtcaggatcaggcttcggcgtcgggtcaggatcgggttcaggatcaggcttcggatccgggtcgggatcggctttctccgccaccgtgaccgtcaccgaggccgtcaccgacggcaccgcgacggatgcgacggtgactgtggccgtaccggccttcagcgccttcaccgtgccgtcctcgccgacgctgaccgcgtcacctgcgaccgtccacgtgaccgactggtcgacggcatcctcgggggtgaccgtgacaccgagaccaacgctctggccgacggtcatgtccagcttgccgtccttgactccctcgccggtgacggcgaggccggtgacctgaggcgcctccggcatctcaacgccgacgaaccgggcgtccgcccaatccgcgtgatcgccccacgtctcgctgcccgcgccgacggccagcgtgatggtcttggcgccttcggggatgtcgacggagaccttcgccatcggcgtgtcgtgctgcatcgccgtcttctcgaagacgacctcaccatcaatcatcacctggaagtcgacatttgcgtggtcgcggtcgacgccggtcagctcgcggtccacgccgacgtacgcctcgaagcggatcgccccgagatcggacacgtcgtacacgatgcgcgaggccgcgtgggtgccgatgcccttgtcgaacgtctgctccttctcgccgtcccacagcgtgatcgtgttgttgccgcagctcttgtccttgcgcaccgggttggtgttggggtcgccggacgtggccgactcccacgccagatcggaggcgtagacgctgtccgtgccggtcacggcaaccttataggagacggtgctgccgccggacgtgacgtccagctcgaacgtgttgtcgccctggtatacggtgacgtcccgggtgaggcttccctgctgcgcatcgccgactgggaccctcttcgagccgttcacccgcatcagctgcaatgtggcagtcgggtcgaaggacgaggcgacgacctgcgtcttggagcgcatcgtcgacgccgtatactgcaggcgtccgtgctccaccgagatggcgttgccaccgaccgacagcgctgccagacccgtgtcaacgccgccaatgcggtcgatcacgaaacggtaggtgttggcggtgatgccgtcggtcgcggtgaccgtggcttcgatgacgttgcggccacgcgccagcttcacgtcggcgcccgtggcgtcgatggccttgccgttcaacgtcgccttgacgctggcatcggcatccgtcgccttgaacgccgcgcgtgcggtgagggccgagtccgcgccgaagtagtacagcgtgcccggcttgaagtcgaacgacttggacaggccgtcgatggtggcggacgacagcgtggccaccgaggacgggtgcccgtccagcgggtcggcggacgtgccgggggtcggcgccgtggcggtcgaggcgctcacccgtacgttgacgacggagccgggcatgcgccgggcgccggcgatgacgtaggtgcggaccgttgtctcgccttcgccgaccgcggtgatcgtgccgtcctggtcgaccgaggcgaccgccgcgtcgtcggacacgtacgcgatgctgccggtgacggggacgagaccgtccgcgccgaccttggccgaatcgtcgctgacgttcacctcggaggcacccatattggccaggtcgataccggccttgacgccgacgtcgtacgtgttgccgccgaacacgacctgcttgcatccgttgagacggaacaggcgcgatcccgacacctggctcaccgacgcggtcgcatcgattcggcgggtgtctccgacggcgagcgccacgtccgcgtcgccgcccagcgtgaccgtatcgtcggggttctcacggtagatcttgttgtcgcggaaggtcaggtcgctgacgctcttcgcgttgagcacccggttgccgttgacgtagaaggtgttgccttcgatcgtcatgttcttgtgcacggtgtcggtggtggacacggtcgggttcgtcggctccaccaggatcgcgtcggatccgctgcggcggaacgtgttgccgcggatcgtcacgtcgcgggtcgggccggattcgtaccagctctgcgcatcgttggagatgtagatgccggccatgcccatgccgtcgaacaggttgttctcgatggtcaccttcttgcgggtggtgaccaggatgccgcgggtcggcgtctccttgaagacattgtcgtggatgttgacctcgggcgtgtacgtgatgttctccaccacgtggctgttgaccgcgacggcggaggggatggcgctgtcgagcgtgaggacgatgtcggtcaggctgcccgaccccgcgcccatgtcaccgccctggccgtcgggcccgtcgacggcggtgacggtgcgcacggagtcggagaccgggagcatgtcgcccttggtcatgaactcgacctggtcgccgacgaagaacgacgggaatccagcggtctcgttgtgcatgtagcgcaccttgatcttggtgtcggagatcttctccaccacctgcaggaaggtgccatgcacgttgatcgggtcgtcatgcgggttggagaagctggagttcgcaacggtgatgacacccttgcagcccgacatctgcacgaagtcggcgtatcctgcggtgctgcggccggtgccttcgccggtaccgaagtgcagcccgtccatcgtgatggtgtcggtcgactggccgaccacgccgaagccgtgcaggaagcggaagtcgatgcccttgagcgtgacgtccttgtccttccacaggaacacgcccgggtggtctcgcgtggtctgtcgcatctgatagctgatgcccgtggcgttggcgagcttgtcgctcatcgacgagtacgagaagaccagccggtggttgccggcgtcggtgatgccggtgacgttctggaatatggggttggtccatacgtcgccgcgcacggtcagtccggtcttcgtgtcatagagctgcacgtacggcagggcgttgcttgccgtccagtacgtggcgccggtgtacgggctggaatcggaataccattcgatgttcgagcccgacagcctgtagttgtattcctcgggcacgtacacggtcgcggtcttggcgcccgcatccactttttcgacggtcaggtcgatgaccgtcggcacctggaagtccacgctgaagttcttgaacgtcacgttccggctgttgatggccgcgaacgtcgtcattttgccgtggaacacgaaatccgaaccctggccgtcgacggtgatgttcttcgtgtcctcaagcaggatgccgatcttcttgtccttgtaggacgagttcgtgccgacggtgttcgatacgtacagggtgcgccgctcggccttgtcgggatagatgtcgtagcgccccttggggaacgcgatggtgacgttcttaccttcggcggcgagttccttggccttgtcgaccgccttgatgattgcgggggcgctgtcttcgccgctatcggcggcggccccgtaatcggcgaccgagacgacgtctcctccggccgcctgcgcggtgttcgtggagaacaacggcgccaggcatatgagagccgccgctaaggccgccgtcacccccccccggccgctctcctatacgctctcctatatccagcacgactcatggtgcttcctttcctcaggggttgtcgattatgacaggcgcggcaaggaaggcgacctctatgccgtcctcacgccgcagacggaaccgcacaggtatcatccatgatttttacggctcctgattatgtaaactatattggcattacattaagacacggcgtcgaaacgtcgaaatacggtatccccccggtggcacaatgagaccatgactgaaaccagcgcttttgcaagttccctcccctcccatcgcccgctgggcacgccgctgggggcacatcccacccgcgtgctgttcctcggctcgggcgagctcggcaaagaggtcaccatcgagctgatgcgtctcggcgcatgggtgtgcgcggccgactcgtacgccggtgcgcccgcccagcaggtggcgaacgaggcacgcgtgctggatatggccgacgcggcccggctgcgcgcgctgttcgacgaggtgcgccccgacatcatcgtgccggaggtcgaggcgatcgcgaccggcgagctgtcggatgccgcggcgcgcggcgtccaggtggtgccgagcgccgaaatcgccgccatctgcatggaccgcgagcggctgcgcgtgctcgcgcacgaggatctggggctgccgaccacgccgtaccgtttcgccgggtcgttggaggagctgcgcgccggggcgcgggaggtcgggtacccgtgcgtggtcaagccggtgatgagctcgtccgggcatgggcagtcggtcgtgcgcggggcggacgcgatcgacgccgcatgggtcgaggcgcaggagggtcggcgcgccgccgacgagggcgacgtgtcgcgcgtgatcgtcgaggcgttggcgccgctggattatgagctgacggtgctgacggtgagctcgtcggccggcgtggtcacgtgcgcgcctatcgggcagaggcaggaaagcggtgactaccgggaatcctggcagcccgcggcggccgatggcaaggtgctggaaagggcgcgtgccatcgcctgtaccgcggtgcaggggctggtcgacaaggccacggcatcgggcgaaaccggatggggcgtgttcggcgtggagctgttcgtactgaccgatggatcgatcctgttcaacgaggtctccccccgcccgcatgacacgggcatggtgacgctgatctcccagaggctgagcgagttcgcgctgcacgcgcgggcgatcctcggcctgcccgtcaccgaagggcatgtggcgctggcgatgggcaacgggcagaccgccgcgagccacgccatcgtggtcgccggcgacggcgaggcggaattcaccggagtggagaatgcgctggccgaacccggcaccgacctgcggatcttcgccaagccgcgagtgcatggacaccgccgcatggccgtgtcgctggccatcgggacggatgccggtgacgcgcggcgcaaggccgccgatgtcgccgatgcgctgaccatcaccgtgcgctagcgccacacgaagaccgcggcacatctttcatctctatccggcgaaagtcccatccgggccgactccaatgggactttcgccggataacacgcagctgagcacacagtcaaacgcgcaaccaaacacgggatcaagtacacagccataggcctccttcatcccgccaaagtcccgtttcggacggtacaggtgggatcatccgcggatagcagccgcagcgagcgtgttagcgctgcgcatgtagccgcccattggtattcttttaccgttagttcacccagaaattccgctcctcaagcatgatttggaaggcgattatggagaaattggaaaagctctacgagggcaaagccaagcagctgtacgcgaccgacgacccggaggtcctgtgggtcgaatacaagaacaccgccacggccggcgacggcgagaagaaggaggacttcaccggcaagggccgactgaacaacctcatcaccacgatcatcttcgacctgctcaagaagcgcggcatcgacagccacctgatcaagcgcgtgaacgcgaccggccagctggtgcgcaaggtgaacatgttcccgctggagatcgtgctgcgcaacgtcgcggccggacacttctgctcccgtctaggcgtggaggaaggtctgcccctcaaggagccggtgctcgaatacttcattaagaacgatgacctgcatgatccgttcgtcaacgacgacgatctggtcgccctgggcgtgtgcacccgccaggacctcgccgagatcgcgccgctcgcccgcaagatcaacgaggccctgatcgagatcttcgccaagatcgacgtcaagctggtggacttcaagatcgagatgggccgcgcgtccgacggcacgctgctgctcgctgacgaaatcaccccggattcctgccgcctgtgggatcagaaggatcactccggcaaggtcgagcaccttgacaaggacctgttccgccgcggcctgggcagcatcatccccgcctacgaggagatcgaggagcggcttgccgagctcgccaagtccgagggcatcgaggtcaccgagtaattcatccaagcgcaagtagcagaacataatgttggctcccctctggaggggagctgtcgccgatagacgactgaggggaggttaaggcgttcactgccatgacatctcccctcattcagcttcgctgacagctcccctccagaggggagccaagttctttcaccacgcctcttcattttttgaataacttcttaagaaaggattctcatggtttttcgcgtgtacgtggagaagaagcccggcttcgacgtggaagcccagcagctcggcaccgaactgaagaccatcctcggcatcgatggcctgcgcaaggtgcgcatcgtcaaccgctatgacgtcgagggcatctcccaggagctcttcgaacaggccacgcctaccgtgttcagcgagccgcaggtggatgacgcctccgcggacctgcctgacttcggcgacgcgacggtgttcgccaccgagttcctgcccggacagttcgaccagcgcgccgactccgccgcagagtgcatccagctgatctcgcagggtgagcgtccgaccgtgcgctccgccaaggtgtacgcgctcgaaggcacgctcagcgaggccgacgtcgctgccatcaagcattacgtgatcaaccctgtcgaggcccgcgaggcgtcgctggaagccaagaccacgctgaagacccaggtgcccacccccggcaaggtcgagaccatcgccggcttcaacgagatggacgccgctgccagccagaagttcatcaacgagcgcggactcgccatggatctggccgatcttgagttctgccagaagtacttctccgaagagggacgcgagcccacgatcaccgagatcaaggtgatcgatacctactggtccgaccactgccgccacaccacgttcggcaccgaactggacaaggtcgacatcgacgacgccgcggtcaaggccgctttcgaacgctatctggagatgcgtcacgagctcggccgcgacgccaagcccgtgtgcctgatggatatgggcacgatcggcgcgaagtggctcaagaagaacggcatcctcaccggtcttgacgagtccgaggagatcaacgcctgcaccgtcaaggtgaaggtcgacgtcaacggcgaggacgaggactggctgttcctgttcaagaacgagacgcacaaccaccccacagaaatcgagccgttcggtggcgcggccacctgcatcggcggatgcatccgcgaccccctgtcgggccgttcctacgtgtatcaggcgatgcgcgtcaccggtgccgccgatccgaccgtgccggtctccgaaacgcttgaaggcaagctgccccagcgcaagctcgtgaccaccgcggcctccggctacagctcgtacggcaaccagatcgggctcgccaccggccaggtcgacgagatctaccaccccggctatgtggccaagcgcatggaggtgggcgcggtcgtggccgccaccccggccgaccatgtgcgccgtgagaccccggcccccggcgacaggatcatcctgctcggcggtcgcaccggccgtgacggcatcggcggcgccaccggctcgtcgaaggctcacaacgtggagtcgctggaactcgacggcgccgaagtgcagaagggcaacgcgcccgtcgagcgcaagctgcagcgcctgttccgccgcggcgacgcctgccgactcatcaagcgctgcaacgacttcggtgccggcggcgtgtccgtggcggtcggcgagctggccgacggtctgtacgtggacctcaacaccgttccgaagaagtacgagggacttgacggcaccgagctggcgatttccgaatcgcaggagcgcatggccgtggacgtggcagccaaggacgtcgacgagttcctggggtacgcccgcgaggagaacctcgaagccacggtgatcgccaccgtgaccgaggacccgcgcatggtgatgacctggaacggcgacaagatcgtgaacctgagccgcgagttcctggcgtccaacggcgcctccaagcatcaggtcgtgcgcgtcgaggagcaggaggcgtacgaggtgcccgcctcgtggcgcgaaggctcgctggccgaccgcatgaacgcggtcgtcaccgacctcaacgtggcatcgaacaagggtctgtccgaacgtttcgattcgacgatcggagccggaaccgtgctcatgccgttcggtggacgcaagcagctcaccccgaacgaggccatggtcgccaagctcccggtgttcggcgagaccacgaccgcttcggccatggcgtggggcttcaacccgtacatcatgtcgaagaaccagttcaccggcgcatacctgtcggtcgtcgagtcgctgtcgaagctggtcgcggccggtttcgaacacgagaaggcgtacctgagcttccaggagtacttcgagaagctgcgcgacgagccggaacgctggggcaagccaacggccgccgtgcttggcgcgctgatggcgcaggtcgacctcggcgccggcgcgatcggcggcaaggattccatgtccggttcgttcgagaacctcgacgtgcctccgacgctgatctccttcgccgtggccgtaggcaacatgaagcgcgccacctcccccgagttcaagggtgccggccaccgcatcgtgcgtatcgcgccgcgttacctggccgacggcctgaccccggacaagaatgcgttgcttgaggcgttctcgctggtcgaggagcttaccgacccgtcgcatcacatcgcgttggccgtctccacgccgggctacggcgcgactgccgaggcgctgttcaagatgacgcttggtaaccgcatcggcctgacgctcaacgagagcatcgccgcggacgacctgttcaagcctgcatacggctcgttcatcatcgagctggcggacaacgagaaaatcccggtggcctccaacctggtcgaggtcggcgagatcggcaccaccaccgccgagtacgtgttcaaggcggcgggcgagacgctggatctggcgaacgtgcaggaggcgtgggagtccggtatcgaatccgtgttcccataccgttccaagagcgacgaagccggcaagagcgtcgaaaccatcacattcgacgcgccgaagaagaccgtgtacacgggcgccggcatcgccaagccgcacgtcgtgattccggtgttccccggcaacaactgcgagtatgattccgccgccgccttcgagcgtgcgggcgcggacgtgaccacgctgatcgtcaacaacctgacgccggccgccgtcgccgaatcgacgcaggcgctggtggacgagatcaacaagagccagatcgtgatgatccccggcggattctcgggcggcgacgagccggacggctccgcgaagttcatcaccgcgttcttccgcgcgcccgcggtcaccgaggccgtgcgcgacctgctcaagaaccgcgatggcctgatgctcggcatctgcaacggcttccaggcgctcatcaagctgggtctggttccgtatggcgacatcgtgccgatgaccgccgaatgcccgacgctgacgttcaacacgatcggccgtcaccagagccgtctggtgcgcactcgtgtcgcgtcgaacctgtcgccgtggctgtcgcgcacggccgtgggcgacgtgcacaccgtggccatctcgcatggtgaaggccgcttcgtcgccgccgaaccggtgcttgacctgctcaaggccaacggacagatcgccacgcagtacgtggacgaggccggcgtgcccggcatggacctgaccgtgaacccgaacggctcgctgctcgccatcgagggcatcaccagcccggacggccgcgtcttcggcaagatgggtcactcggagcgctccggcaacggcctgtacgtcaatgtgcccggcgacaagtaccagccgatcttcgaggccggcgtcgggtacttcgccgcgtgacggtgatgactgactgataacagactggggcgggaaccttctcgggttcccgccccagtctgttgttgatgaagtatggcctccgcgcgatacgcggcggtatggattactcggcctttgagggcgcgacaggttctgcgaccgccgcaccgttcgccacaggagcgctgttaacagtgttgttggccagttgctgatgcacggtcttcgcgatgtgacggctgaccatgaaccaaatcgccccggcgacaaccacgacaaacgaaatcggatagatatactcagcgattccgtatccatactgcgaggaaggcagtacgccacgatcgtcaaaatcccaacgcagtgcatagaaagcgactacagcaagcaccgagaatacgatggccgcgatcggcttcttcaacactccgaacagcagaataagcagcgaagacaccgcgatgaccgccatgagcgtaatgcatatgacagcttccaggtacatgccgccgagcagcttcccggactggagacccgcgatgtagatgcgcaggaatgtcagcagcgacagccccaccacatccttgttgtgtagaccggcttccgcggtgtatacccgatcaccatactgcttcaggtattctgcataatcgccctttgctgaggcgaacggcaggaagaacgacaccgccatcgccactgcgccgaccaccaacagcacatacggaatgagctgcttggcggggagcttcttcgagacctgttggccttgtgctatatctcccatattgtcacctttctttcctgtgttctcgtatcatgtttgatgacgggttgtgaccgtgcacgtgatactgtgcacgaagtgcttagtcatcgggtatcaatcacttgggattggtcgtcgtcacggtcaccgtgtacattccggcttcagcagtaggctcatacaagcgctcgatgacatctttagcctgtttattggcaattttcagcagttgtgttcggtttagccgagcttcggtctttttcttggcgtctttcatcgcagctttagtgtcctctacatccgctgcgttaaagaaggaatcagacttgtcaaagaaacgcagtgaatcgggattgacggccaccgactggattttcggtgcaggtagcgtgatagacactgttttggagtccttgtcgatttttatctgggccttggccagatcgacccccgcgcgcacctcgtatgtgtagaacatcgtgaactgcttcttgttcaggaacgcaataccaccgtcttcgtatttctcgaagccgtaatccgtttccttagccgtggtaagatcctgaatcttctccagctgcttaacgacgacttcattggtcaattcctgttgaggattgaagaacttggtgatggcaccacgaatccatcctccggcgaacataaagatgaaggcgacgacgaccgacagaatgattgttgctttcaggctcatcttgaatgatgagccatctttgtcgacgcgtgcgcgcatttttcaccttttatctttcatactctcatcatctcaattcatgtggcatctgatgcaatccagttctggcatacgtctacaaaatgtatgggcaaaaccgcgacgagacatcagtcgtcgactgaattcgagctggttctcaccggttatgcaacacattagcgatgcacaatcagcaacacaataattataacgtaaatattgcgacataatgctatatctgagcttggttatgatccttgtgctggcaacgttgccgaaccatcatgcaccggtcggcatcaacacgatgccgtataagaagggaacgacaatgacatcaccgagaagttcgatttcccagtatctcccgcgaaattgcacgaagccgtccgatccatgttgtcatgcggcgccgcattctcactacgcgaagcaaatgacaccgaaatgaaaacgacattcactccttacgacagcgacgatgtcctgacagcaaccgtgaacggcagcggtgacgagtcgaagataacgctgtctgcacaagactcgtcgaatacaggggcgcgcatcatgcgctttgccaccgatttggctgcccggcggagaggggcgaaggccggagcagtgattggcggggagcgtacaatgtgggatatgagcgagcatgtggagcatgggttcggcccggtgtgggacagtgaatcgcggattctgatactggggtcgatgcccagtccgaaatcgcggaaggcggcgttctactatatgcacccgcagaatcgcttctggccggtgatgcaggcgttgttcgccgacccggcggatccgtctgatgtcaccggcgactcgctgcaatcccgccgcgcattcgcgctgcgccaccatatcgccttgtgggatgtcatcgcgtcctgcgacatcaccggggccagcgacgccagcatccgcaacgccacgccgaacgatctgacgcccctgctgcgcgatgcgccgatcgctcgcatattcaccaccggagcgaagtcggcgcaactctatcgcagactcatcgaaccacgactggccgcaaccggcatcaccatcggcatgactccactcccctccaccagtccggccaacgcctcgatgcggctgccggcacttatcgaagcctaccgactggccttccagagcgcaggcgctcttgaaatggcggatgaaacggtcactggtctctgacgcgatcgcggcgtggccggcggcgacgggcaatcgacgcgcccaaccggcaggccgggatgagatacaggaacggcgccgcggcaagactgctcgccggcgcattgatggcggcaagcggaacagctcccgcaatcgaccagggaataagcggcgcaatgaccaccccgaatcgtcagcctcagccgaatgatatgcgccggagcacaactgatgggcgcaacgatcaattgcggcattggctggcggacggcaatctcgatgtggcggtggcggatttcaccggcatgccgaccggcgtggagctggtggatttttatcaggaacgtatggtgttggtcatcgcgaactcgctgtgactggatctcgccggcggcgggaccgccatcggcgccggatgagaccgccatcggcgccggtgacctgtcatccttggagcgctgcccgttcctactgggcaatccgcaggacatcgacggacgcatcggcgacatgctgttccgccgagccggattcgctcccgtggctgcgggccgggaacctcatacgcgatagcttcggcatatccgcctgcgactaccggtggagcgcgatcgatgatttcatcgactgcgcgcgccggagcatcagcaccattgaccggcatgattccggccggaaccgtcggatcacgcctgatagtcgttgagcatggcctcgatgttgttgccatcgggatcatggacgaacgcggcatagtagcccggcccgtagttcgggcgcggaccgggcttgccgttgtcggtgccgccggccgcgagacccgcctcatggaacgccttgatggcgtcggcggtcttggcgcggaacgcaacgtgtgacggcacgaccggattgccgtccttcggcgattccagccagatgccgtcgccgtcctcgtcgttggcgaagcataccgcagtcgggtatgcggccttcttgacatagcccagcggcgccagcagcttctcgtagaaatcggcgcgcttggcggcgtcggcgacgaacagtccgatgtgatcgatcatgatgaacctcctatgaccatgtggatgactattccattatccttgcgtcgctcgtgacgcgggtgaatatcagctttgggtaaagccccgtttcaggcgccgaaatcggtgtcgccggcggcgtcggcccgggccacggcagcctcggcatcgcatgcggcctgttcgatgacccgctcgtagccggtcaacgcggcgaacggcatgaactgggcggcccgctgacgacgggacatctgcggatgcctgcgcgacacgtgatgcggcatatcgatgatgtcgtcatatttatgcgtctcatgtaatgccatatggactccttttcacgcccgatagcgcaatacgttcgatacgctcatgcacgatggcctccgatctgccgattgcggtcctggccggtggcgccgtcctccatgtccatcgccttgatgacggcattgcggccgaatttcctcttgacctccagcaatgcagtctgcatgtcatgctcacgccgcacatcactgttcgaaatgccgacatggccatcgttcccctcctccgcggacgaatcgatccgggaaaacagatcaagctgctcgtagcgtttgccggccgcaagctcattcgccgtggccacatcatcggcgatgacggtgagccggcgcaccaacagacgcggatccacgatgcgctcgtacagcatcgtcatcgcctcacggatgcgagtggaagacgaggtgaactcccccagtccgatcgacccggtggccggcttggggacccgccgcccataccggtcgacggacaccggcccgcgatagctcttgcccgcctgatcggaggcccgtttcatcgccgaatccgcgcaggaatccagtttggtcgagtcaaggctgccgatgtcgtagccgaccgcgagcgtcagacgattcgtcagcacccgcttgccgacaagatccaaggcgagcgcgtccgccatctccttgacgatgagccgtcccgtggcatagtcggcgggcccggtgagcacctgcccactgctgatgctgtgcgcatccggctcatacgattggatgtccgcgatcgtgcacggctcccagccccacgcatggtcgatgagtagttcggcattcctgccgaacatgcggtagagcagatcctcgttgtagtagtcggaggcccggccgatcgagcatcgggcgacatcccccatggtcagcaggccggcatgctcaagcttccgggcatagccgcgaccgacccgccagaaatccgtaagcggacgatggttccatagcagtcgccgatacgacatctcgtcaagctccgccacacgaacgccatcctcatcggcgggcatgtgcttggccacgatgtccatcgccaccttcgccagatacatgttggtgccgatgccggccgtggcggtgatgcccgtctgcgcgagaatgtcacgcacgatggccctcgccatctcgtgcgggcccatgcccagcgcgcgcagatagggcgtggcatcgatgaacacctcatcgatcgaatagacatggatgtgctcgggcgcggcatatcgcaggtacacgccgtacaccctgccgctcacctccagataatgcgccattcgcggcttggcgatcaccatcgacgccttcaatctcggggaatgttcaagatcccgagaatcacaggattcaccggacagccgtccaccaggagccagcatcgcccgctcggcgttcaccgatgccaagcgctgccgaacctcgaacaaacgtgcgcgtccgggaatgccatacgccttcagcgaaggagacacggccaggcagatggtcttgtccgtacgctcctcatccgccaccaccagatgcgtgcgcagcgggtcgagaccacggtcgtgacactccacggaagcgtaaaaagacttcaggtctatggcaagatacacatgctcgccccgaaccatcgccaccaccccctttcgcgctttcgtttcagagtacaatcattatgagacatatgttcgatagtatgtcgccgcccatgaggcccatctgccacacccccaagcgcggatgtagccgccgattggtactgtggataggtagcgaatcccctgtctcccatgttttggaaggagctttggcttgtcagctgaactcgaagacattcacgaagaatgcggcatcttcggcgtatggggtcacccggacgccgcccgcctgacgtatttcggactccacgcactgcaacaccgcggtcaggaaggcgccggcatcgtctccaacgaccacggccatctcatcggacaccgcggcctcggactgctgacccaggtgttcggcgacgagcgcgagatcggacggctcaccggcgacaaggcgatcggccacgtgcgttatgccaccgccggatcgggcaccaccgacaacatccagccgttcatcttccggttccacgacggcgacgtggcgctggggcacaacggaaacctcaccaactgcgtgtcgttgcgtcgcaagctggaggacgaaggcgcgatcttccactccaactccgacaccgaagtgctcatgcacctgatccgccgctcctccaagccgaccttcatggacaagctcaaggaggcgctcaacaccgtgcacggcgggttcgcctacctcatcatgaccgaggacgcgatgatcggcgcgctcgacccgaacggcttccgaccgctgtccctcggcaagatgaagaacggcgcctacgtgctcgcctccgagacctgcgctctcgacgtcgtcggcgccgaactggtacgcaacatccgccccggagagatcatcgtggtcaacgaccacggctacaagatcgtgcagtacaccaacaagacgcagctggccatctgctccatggaatacatctatttcgcccgcccggactccaacatctacggcgtgaacgtgcactccgcccgcaagcgcatgggcgcgcgcctggccgaggaatccccggtcgacgccgacatggtcatcggcgtgcccaactcgtcgctgtccgccgcgtccggttacgccgaggccgcgcacctgcccaacgaaatgggcctgatcaagaaccagtacgtggcccgcaccttcatccaacccacgcaggagctgcgcgagcagggcgtgcgcatgaaactgtccgccgtccgcggtgtcgtgcgcggcaagcgcgtcatcgtcatcgacgattcgatcgtgcgcggaaccacgtccaagcgcatcgtccagctgctcaaggaagccggcgccgccgaagtgcacatgcgcatcagctcgccgccgctcaaatacccgtgcttctacggcatcgacatctccaccaccaaggagctgatcgccgcgaagaaatccgtcgaggagatccgcgacttcatcggcgccgactccctcgccttcctgtcgctcgacggcttggtcgaatccatcggcctcaacgcgcaggcaccctacggcggactgtgcgtcgcctacttcaacggcgactacccgaccgcgctcgacgactacgagaccgacttcctcaagtccctcacccccgaggaccgtgtccgtctgcccgaattcgcgctctacaagagcaagtacgaaggcaacgagtacaccaccgcgccgacgcagcaataacggcgttccagcaccacagaccaatcccaatcccgacacaacccaacaagcatcatccaagaaaggtacgtcatgccacaagcatatgaaaacgccggcgtcagcgtggaagccggctacgaggtcgtcaagcgcatcaaatcgcacgtcgcccgcaccaaccgtcccggcgtcgtcggcggcatcggcggcttcggcggcctgttcgacctcgcgtccctcggctacaaggagcccgtgctgatctccggcaccgacggcgtcggcaccaagctcgtcgtcgccaagatggtcgacaagcacgacaccatcggcgtcgactgcgtggccatgtgcgtcaacgacatcgccgcccaaggcgccgagccgctgttcttcctcgactacatcgcctgcggcaagaacgatccggcgctgctcgaacaggtcgtctccggcgtggccgacggatgcgtgcagtccgaagccggtctgatcggcggcgagaccgccgaaatgcccggcatgtatgacgaagacgaatacgatctggccggattcgcggtcggagtggccgaaaagtccgccatcgtcgacggctccggcatcaccgccggcgacgtgctcatcggactgccatccaccggcgtgcactccaacggcttctccctcgtgcgcaaggccctgttcgagcaggccggctataccgtcgacaccatgctccccgaactcggcggagccaagctcggcgacgtgctgctcaccccgaccaagatctacgtcaagacactcaagcccctgttcaaggcaggcgtcgtcaagggcgtcgcccacatcaccggcggcggtttcatcgagaacatcccccgtatgatccccgacggcctcgccgccgacatcacgctcggatcctggcccgtccttcccatcttcgacatcctggaacgcgccggcgacatcgaccacaaggagatgtacaacatcttcaacatgggcatcggcatggtgctcgccgtctccgccgaacgcgccgacgagacgctcgccctgctcaagaacaacggcgaagccggatatgcgatcggcacgatcgtccccgacaccgacggcacgcagatcacgctgaagtaagcatccactcccgcactccccactgatggggagtgcggtcacaagcgaatccgggggtggccggcaagcccccccagtccgtctgcaacggacagccccgccagcggggcctgaagaaaggacacatcatgggtcagaaagtcttggtcatcggctcgggcgcacgcgaacacgccatcgcgcacgcgctgctgcgcggcgacagcgtcagcgaagtcaccgtcgcctccggcaaccccggcatggaactggacggcatccgcaccacccaaatcaacgaatcaaaccacgccgccttcatcagcttcatgcagcacaaccagtacgactgggcgttcgtcggccctgaagtccccctgatcgaaggactcgtcgacgacttcgccgcggccggcatcaaggccttcggccccaacaaggccgccgcccagatcgaaggctccaaagacttcgccaagcagctgatggcccgccacaacatccccaccgcccaataccgcaccttcgacaacctcgaagactccgtcgcctacgtgcgcgaacacggcgcccccatcgtcgtcaaggccgacggactcgccgccggcaagggtgtcaccgtcgccatggacgtcgacaccgccatcaccgctctcgacgacatcttcatcgaccaccgcttcggcaaggccggcgccaaggtcgtcatcgaagatttcctcgaaggccaggaattctccctcatgagcttcgtccgcggcaccgaattctggcccatgcccatctcccaggaccacaagcgcgcctatgacaacgacgaaggacccaacaccggcggcatgggcgcctacagccccgttccccagatcggccaggacgtcatcgacaccgccatcgacaccatcgtgcgccccaccgtcgaagccatggccgccgaaggcacccccttcaccggcatcctctacgccggcctcatcgccaccgccgacggccccaaggtcatcgaattcaacgcccgcttcggtgaccccgaaaccgaagtcgtcctccccaagctcaccagcgatctcggagcagccatcagcgccatcctcgacggcggcacccccgccttcacctgggacagcgacaacgccaccctcggcgtcgtcctcgcctccaacggctaccccgtcaacgtcatcaagggtgccaaaatcccctccatccccgtcgacgacgcctcccacgtctactacgccggcgtctccaacagcgaccaaggcctcgtcgcttcctccggacgcgtcctcctcatcgaaaccaccgcccccgacctcaagtccgcccaagacaaggtctacgcaatcatcgacaagctggacacggagggaatgttttaccgccacgacatcggtgccaaagcgctgaagtgagttgtgcggcgcatctgctgcgttgcggaacgctcgaagtaccatcgtacgtcgtcgcattccgcgccttgcatctgcaccacaaaactcacttcaggcggtaaaaagccgtgtatggcatgcctatgcaattgcccccgctagcgggggcaattgctattttgtgaggccttacggcagatccatgaagtcggtgtctttcagatagtttttgccggccgtgatgtcgtactggatgagcttgtaatcggtcatcagctgcttggtctgctcgtcgaactcgtcctcggccatcgggttgcccgccgcgtcaagatagatatcctgcccctcggggatgcggtcccatccctggatcttgttgaccaccggcggctccatggcggagaccttcttgtgcatgagcgtcaggaacgccaggtacggcgacaccttcgcgttcatgtgctccgcagtctgcgccacgaaatagttcggcgacgagtacacgctgttgtcgaccttcttgccctgcgagccggacgccttgttggaccatatgaaataatccgtcaaatgcagcgccagcgaattgttcgtatcctggctggcggtttcgtagatgcccggcagatggtcaccatagaacacgaccgtcaccggcttgtcgagcttgttgagctcatcgaggaagttcttcgtctccgtatcggtgatgctcgcgcccttcgcatacgtgtcgatggccgtcacttcgtcggagccgagggaatcggcgccgtcggccgcggtggccttgaactcgttgtcggcataccagtcgttgtacggcatatggttctgcatcgtgatgatctggatgaactggttcgaatcggtcgagctgatgtcctccaacgcgctctgatacgtggccttgtcggacacgtacggggaacggtcgatcttgtcccgatgcttgatgatgtcgtcgccctgcagcgtgtagaaatgcgcgaatccgaacttcttgtagttcgtcgcacgcgaatacatcgacggctcatacgggtggaaggcgatggagttcttcggagccccccacatctggttgatcgtcggcgtccaatgctgccccggtaccagctgctggtacgggctggtcagagacgagtcgaaattcgccatgctcaggcccgacaatcccatatactccaggttcgcggtgccgccaccgtatccggacgacagcatcagaccgctggtcgtgccggatttgatggcacggacctccggaatggcgtccttgttgagcttcacaccgggtacgcgcgcggggtctgagaacgattcggacagcacgtagaccaccgtcgaatcggtcatgttcttcgtgcgcgaggcgttgatcttctcggcggcggcctcgtacctcttgacgacctccttcatcgtggcctcgctgtaatcgctcggctcatccatgatcgtcgggttgagctgccgggtgaacgagaccagcggaccgttgcgctgcgcgtcatacacggaatcccacatcgaaggagtgtcgcccagggccttggaaaaaccgttcgcccacgagccgacggtgctgacctggtcacagtacaggccgaagaacaacgacggcagcaggaacaccatcagacggattccggcggccaaccccttgttgtcgaaacggatcatgcgaccatgccggccatcgacatggttgagcaccacgaacagtgcgacgaacaccaggaacaccgcgagtgcgccgaggatgatccaatgggcccccggaggggtgaaactcatcagattgccggtattcgagccgaggaagcccaggtcggacggcagaatcgcctcatagcgtatggacaccttgaaatgctcgatgacgcccacgatgatggccacggccagcagcaccggcgtggctatccagaaccggttgaacagcatgagcagcgccagatacagcgcgccgatgagcagcaggttcagcacgaacacgaagttgcccttggtccacatcttcgacacgaaaccccagcccacgacgggactggacagctgcacgcgcgtgccggactggctgacgccccactgcagcgcagcgaccgccgccatgtcgaacaccacgaacaggacaccgtacagccagccggggaacggcttatactcacggcgaccgccgtttctgccgcctttgccgccgttcctgccggaagaggagtcggcccgcttgatatccagcacctcgatctcgccggacggactgacggcattggccacgttcgtaccgtcgtcgttcttgtcgtttatttcgtcgctcatatacccgcacttcgtgtgattcgcatggcgccatccgacccatgcccaattcgttatcggccatatacacgtcatcatggttcttccgccgcgtcacgcgcggaagggaacggccatgcgccgccatgatgaataccgaatgacattctagtaaagaaacgacgacaatggtacatcacgttcactgatatttccctgaatctccccgtatgagaccagtctgagacccgtatgggccactcgccgcccgttggaatccgcgcggaagagccccgcatgatccgcataagtgggccccgtatacagcatcgggcaatatcatccctgagacggacgaaaggcgccgggtcataccgggtaacatcgaccgatgacacttacaagggggatgatcgcatggaatcgttgccgagttgggtgacgaggttgctacatatacgactcgtctcaggcccgttgccaaccacgatatgggtgattgtcggcgtgggagtggcgatattgctgctgtggcaggtcttcaggagcgatcggtccaagctggcgaggcaggtgcccatcatgcttgtctgcggtggcttcggcctgctggtcatgtggctgctttccgaaaaattcatggtattcggcgtatcgctgggctggcccgtcatcatggctgcggccgcgtgctgcgcgctgttgggactgctggtgacgaccatcgtgcacgcccggcgcgcccggcgcctgatggccgcggcgctcatcccattcgtgctggtctccaccgcgctccgcatcgactcgatttacggggagtatcagaccatcggctcgctgatcggctattcgtcatatcatccgctcagcacgtcgcacatgcagaaggggaccctgaccgtcgatgaatggctgcgcgaggtgctcgatggcaaactgccgcccgccgccgcgcacggcaaggtctattcggtggacatatccaacacagcctccggattccgcgcgcgtaccgcggccgtctacatgccgccagccgccctgagcgacacaccgccagagctgccggtactcgtcatgctcgccgggcagccgggcaatccggaccgcgtgttctcggccagcggcatcgccgcgatcctggaccagtatgcgaaggcgcatcacggtctggcacccatcgtcatctcgcccgaccagaacggcgacaacacggtgaacagcctgtgcgccgacacgaccaaggttggacgcgcggagacgtatctgaccgtcgacgtgccacggtggatcaaagcgcatctgcccgtgtcccggcaggcgcgggattgggcgatcggcgggttctcgcagggtggcacgtgtgccacccagctgggaccgcggcacccggacatattcggctccatcatcgccgtggacggcgagctgaagcccaccgccggatccgtggagcatatggtcgccgaatatttcaacggtgaccgcagcgcctatgaggctcaagtgccggccaacgccatcgccgaccacgcgccttccaaccagatcatgattctgggggcgggcaagcgcgacgcgagatccataaaaaacgtcatcgtcaacggccaggccggtgtcaaggccggcatgcacgtcgtgaagatcgtcgtgcctgacaccggccatgactggcattccgtcaacgcgacattagaggcggccgtcccctggctgtgcgcacaccgctggggtctgggcgaaacgggcctgacatggtccgactatccgagaatcgaggttctgcaatgagcgacacgcaagtcgaaccggagagcggcaaagaaagccgccgcaaatgccgtacccacggcaggatgcatgccttggtacatgacgtgagcgtctggattcacgggcatcgcctcgcagtgacgttgtcctgcacgttcgcggggctcaacatcgccatgtggatcggcttcgcgctggccggccgtccactgcctctgcgcagcctgcgcaccagcctgcaggagttcaacctgctgcatctgctggccacgctgctgctgacacgcggaatcctgcagctgctcgtcgacacgatcgcgctgttggtgatgttctccatcgccgagacgctgctgggccgccgccgcaccctgacggcggccttcatctgcacgctcgccggaacggccctgggactgctgctgtgcggaggcatcgcccaactgctgcagggcactccggtggtgggccgcatccgtttcgcgctcagcccgctgacgctgggcgtgggcgcgatgatggcggccagcgcgttcacccgccgcctgtggaggcggcgcatccgtctgatcggctatgtgtccattatcatggttgtgatgttcagcggtaatcccggtgactactgcctgctcgcggcggcgggatgcggccatgtactgggcgcgctggcatccaagcggaagaccgtccgacagctggacgacgcttcggcggcggatccgctgcactggcagctgagcacgtcgtacgagacccgtcgcgtgttcgcggccatcgcgctggtactcacgctcggcccgatcatcgcgatatcctcaccaacccatatcggcccgttgagctcattgggactgattatgagcccggcctcacccgatgacggcaagctcgcctcctgccttgccggcatggcccgcaccgactgcttcttccagttcaatctgctgcgggtgtccatgcctggggcggtcctgcgttccctgctgccgaccgcggtgatgctcatcatgacctggggcctgtatcgtggcaggcgtctcgccgcgtgggcgttcatcatcgtcgggctgggggaatcctgcatcgcgatgctgtactatttcgtggcgcctctgtctcacgcgccgcaggggttgcgttccctgctgctgcacggcgcgattccggcgagcatcgccaacgtgctgttgccgatggtgttcgccatcgccgtcgcctgctccatgcgccacttcccgatccgcacggacgcggggcgtctgcggcgaggcagcgcggcggtcgtcatcgccctggccgtctgcatcgcggcgtatctgggcttcggactgttgcgccccggcgatttccgacctccggcgacatggcatggcctgatgcatgagctgccgtcacggttcattcccatcgggttcctcaaccgcagcaggccgtcgttcctgccgcgcaccgtggccgcatcggtggtcgatcaggccgtgggactggttttctggctcgtggtgctggtcgtcgcggtccgatggatgcgtgagatcctgctggtcgacggacgcgcccgcgccaacgccggccgcctggtggagctggatggcgagtcgatgagcttcatgaccacgtgggagggcaaccattactggttctccgccaccggacggtcggccatggcataccgggtgatccacggcatcgcgctgacgaccacgggcccgttcggcgaccgtggcgaatggtcatccgacctgcgcgagttcgctcggttcagcatgcagcagtcatggtcgcccgtgctatacagcgtgcatcgcgagcagcgcgaccagcttgccgccatgggctggtattcgctggaggtcggcagcgagatggtggtcgatccccggcaatggaagacgaccggcaagaaatggcaggacatccgcaccgccatcaacaaggcgaaacgttccggcatcagcgacgtgatgtcgaccttcaacgaggccccgaacgacatacgcgaacagatcgaggagatctccgagcagtgggcgcagctcaaggcgctgccggagatgaagttcacgctgggcggcgtcgaggagctgcacgacccgcgcgtgcgcatcctgtacgcgatcgacgccgaggggacggtgctaggcgtgaccagctggctgccgacgtggcgcgacgggcgcatcatcggctggacgcttgatttcatgcggcatcgcaccgacagtccgaacggcatcatggagttcctgatcgcgcgcatggcggagcggctgcgtgacgaggggctggagcaccccgagtgcgccgtcgagttcatgagcctgtccgccgcgccgctggccggcatgaacccgcagcgcgacaatgccgacgagaccggacatatggataccggcaccgtcatgctgcagcatgcgctgcagatcgtggcggattggatggaacccgcatacggattccactcgctgttcaatttcaaacgcaagttccagccgaccgaggagccggtgtacatctgctatcccgatccggccgtgctggcccaaatcgggctggcggtcgtccgcgcctacgtgccgtccctgacggcgaaggaggccatgggcatgctgcgcacactgcagcggtagccggtcatccggcccttcatgggttccggacaatcgccgtgacgcgcctgtgtgcacggcagggttgccacgcataaaaaacaacaatcgcaggatttcaccatcccaaccgtcctccccggcagccctgcgacgcatttgggcgtgtctcccataagacgcatgttcggccgatgacgatgatcgtgtacccgccgcgtgaatccggatacggtcggcgtgtccatcatcttgcccgtatatgcgtccggcgggatttcgcagttccatcgcggacgagctcaactgttacacgggtcaagcgtcactgtgcgtgggtaccgtcaccgtgcgtgccctcgcagtgtgactgcgtcacgggaatcattggaaaataagggtttctaccgcccgcgtcactgtgcgagccctcgcacagtgacggtacccacgcacagtgacggccagatcatccatcagacgaaacggcatccacatcgtgaaaatgacgccattccagcccggccgaatcggatgattcgctccccggagcccgtcgcgaagcaatcggagactgctccgaagagcccatcacggaatgatgcccctccatgcgcagaagcgacgaggccccgcaaggaggccccgccgttgaaggggatatagatagagatagaatcagcgcgccggcatcacgccttggcgaactggtcgacgagggcgctcatccaatcgagcaggttggtgtattccttcggcatctgctcggtgagctcgacgatcgggacgttggcgctcttggcggcaccggtgatctgatcggtggtggagttagcttcctgcgtgttgaataccagcatcttgatggagccgcccttgagggcgtcctggaacgccttgatgtcggacggggtgggctcgctctcgttggcggaggcctgcgcgtagccggtcggggtggcgtccttcatgtccaggtcgtcggcgaggtaccatgcgacggattcggtcgcggcgtacggcacatccttggtcttggcggaggcgtccttgatcttgctttccagctgatcctccttggcgtgccattccttattgagcttggcgtagtcgtccttgtggctcgggtcggccttctgataggccgcggtgatggcgtcggcggtgttgttgcgcaccttggcggagaaccagacgtgcgggttgtcgccttccttgatgccggcggtttcggctgcggtgaccagcgtggccttcgtcgcggatgcggccttggacgcccacggatcatagtcggcaccgttcacgacggcgaccttcgcggtgccgaacttcgcgacgtcctggctggtgggctcgtagtcgtgcgcttcgacgttggtcttcgtcatgatgttggtgacgtcgacgtgggagccgccgaggtccttggcgacggagccccactggttgatgctggcgacgacttcgatggtgccgccgccttctcccccggcggtcttgttgtccttgctcgttccgcatgccgcgacggccaccagcatagaggcggccgccacacccgcgacggtgcgcctgatgatagatgaaatctgcatttgttattccgttcctctccggatgatgacgggctttctcccgttctttcggttcacagtatacacgttattgagatttattatcattatcgttatcaaatgggcgtgtcgcgcggccgatcacgcaccgacggacgactcgacttcatacaggccggcgatgtcgcacaggttcgcctcatgggcatcctcgaccaccacggcgccccgcctggccacggcgcggatgatgtcgcggcacgcgcattcgccgtcggcatccacatgccgcgacaggcagccccggccgaccaccggcagctcaaggacatgcgtcgcctcccggatcaggcgcgacaccaccgcgccggtcgaccgctcgtcgaatacgccatcctcgtcacccgtgccatacacgcacagacggtcgtcgtcgaagaaccgctcctcgaactcgtccagaccgaccgcattgaccacggccgcgacgcccatgccatcaccccacgaatcaaggcgcaccatgtcttcgagataccgggcgaccggtgtcgcctccagtcccaccggaagacccaccaggaacacacgggcctgacctcgcagagaggcgagcgtcccgcccgcgtcgtgcttgaccgagcagctcagacaacaatccgacagatcgaagatttccgcgtcgcccaccccgacgccctgccccaccgggcggctgacacgcctgacgatgctcagaccggcatccgcctcgccattcgggcgcacatcgtacgagatcgcgcatacggacgcatacgagtcggccagggagaacgccacggagtccagactcagccgatcggcgcccgtcagcagcaccaccgccgtatccgcgtttccccgtgattgcaatgtcggatgaatcatgatcgcctttctttttgataatgattatcattgtgatatattggcatccatgtccaaacaatgtcaaattctgggcacgcgcgcctcaacgggcaaccgtgtatcccactcgcataggaaaacacgccgacgcttcaacccgaacctgcagaccaagcggtactgggttccctcgctcggccgtcacgtcacgctgaccgtcagtgtcaaagggatgaagaccatcgaccgcatcggcatcgaagcggccctggcacgcatccgccgcaacacgccggaccgtctggaactgacgaagttcgacccggtcgtacgcaaacgggtcacattccgcgagacccgctgaatccgttccgacggcccgcacgaaccgcggccgtccgagcgtcatctcggcacacagccatcatcaaggagcctcaatggcaaagaccagcaagatcaacaagcaactgcaacgcgagcagatcgtcgccaaatacgcgcagcgacgggcacagtgcaaaagggactcggtcaacccgcacctgaccgccgacgaacgcgccgaggcgatgcgccgactgcatgcgatcccccgcgacgccagcccgaccaggctgcgcaaccgcgacagcatcgacggccgaccgcgcgccttcaaccgtaaattcggactgtcccgtatcaacctgagggaaaaggcgcaccgcggggagcttcccggcgtggtgaagagcagttggtgatccaccgcggcgcaccaacatcgcatcatcagaaaggcatcaccagaaaggcatcatcatatgaaagacaacatccatcctcaatacgggtacgtggtattccgcgaccggtccaccggaaaggcgttcctcacgcggtccacgctggtcgcgaaggccgcgagcctgccgaccatcgaatgggaggacggcaacacctattccctggtcaacgtggaggtgtcgagctacagccacccgttccacaccggccgcaacgccgtgctcgacacggccggccaagtgcagaaattcaacaagcgctacggacggagctgacagggccggcgaatgccggcatcccaatgcgcgaaccacccccacccgctacgcggaagcccccgctggcgggagctggctcgcgaagcgggactgagggtggtcggccgaccggcgcagcccatacatcaacactgcataaacccaccaacactgcataaacccatcgaaaacacgaaacggagcaacgatatgaaggtcaaatcgtcgatacgctcgttggcacgcaaggacggctcgtacgtcgtgcgccgccgcgggcatctttatgtaatcaacaagaagaacccccactggaaagcgaggcaaggctgatggcactgccgaaagtcagaacgtcgcgcgcgaacacgcatgcgcgcaggtcacaatggaaggctcagaccgcgcagctgatcgccgtgcacatgcccgatggcgaggtggtgcacgtgtcacacagtctggtcaaggccgtgcgcaagggatacgtgaagccgcggtagacccgcgacccgatgcgtgatgggtcaatccacgcgagccagccgccaagaccagtgacatggcctcagcagggacttatatgcagggtgccgcttctcaagacgagaggcggcacctttttgcattgggaaccattaccaccgtggtacgatatggcggcatcatcccataccgacagcccatgccggcaattcaaggagcgtcataatgtcatggggacatcacaccggcacggttcatgacggcaccggacggggacaccacgccgatggcggcagtcccattgacgccaacagcgccgatgggcgcgaccattcggcgcattacctttttctcatcatcggcacgccgctggtggcgttcctcatcgccgcgtccgccatgttcgaatcgcgcggtctgccgattccgctggtgcgcatcggcaccggcgccgccgggctcatattgcagacgatcccgttcatgctggtgggcgcgatgatgtcggcagcggtcagcacattcgtcagcgccgatgcgttggagcggcacgtgccgaaatcgctggccggcggactggcgatggcgatgatcggcgggctgtgcctgccggtatgcgattgcatggtggtgcccacgttcgcgaatctggcgcgcaagcagctgccgctgccgtacgcgacggcgctgctgtgcgcggccccggtgatgaacccgatggcgatctggtccacgtggttcgcgttcacgggcagtccatggatggtggcggcccgcgtgggtctgggcatgctggtggcgagcgccgtgggattgtcgttcgccgtccgcccgtcccgctcccccgccgtacgggaccttccgctgacgaggggccggacgccggcctgtgatggctgcgccgtacaacatgcggggcaggatgggcgttcccgcttcatgcacttcctcaggcacacgcacgacgatgtcatgcgcatgatgccgattctgctgtccggcacgattgcggcatccatcgtacgcaccgcgctgtccccgctgaccgacggctccggcacgatcgacggcatcggtgccgtgacgctgattgcggcggcgatggcgatagccttcctctgctcgctgtgctccacgtccgatgcggtgatcgccgcgagtatgaccggcgtgttgccggcttccgccatgctcgcttttctgcttttcgggccgatgctggatctcaagaacacgttgatgctggtcatggaatgccgtccgcggttcatcatccgctttgtcgtgaccgtcgcggcggcctgtttcctggtcgccgtcgccatccatctgacgacgggagcgtgatgcaatgacgaatactctgaactttcccggctccgaccggcatgccccggcggcacggcatgctcccgcgcttcccgaccgtatcgaggcgatctgtttcgcggcactgggcgcggccatcgtgtattcgactacgagcggctcgtatatcacgctcaccacgccccgatcgctgccgtatctgatcgtcggcgcgatactgctgttcgccctgtccgtcgccgcgtggctcggcgtgttccatgccgacgagcgatcctcgtttcgtttcctggtcgcgctcgtcatccccgcgctgctcatcgccgtgccgttccaacccggcaacggcaccggtttcgacacgtacgccgcaggacgggccatcgccatacgccgggacgcgcacaagccggcgggattcgctcatctccacgggctcgacgaggagcgcaagaccatcaccatcagcgatgacgaattcggctcgtggttctcccacatcgaccacaatccgcagcgatacatcggctatcgggtgcgtctcaccggtttcgtctacgagccgtccacgctcggcgcccatgagttcgagctgtcacggcaattcatgtcctgttgtatcctcgatatgacgccgttcggattcaccacgcactatgcgaagaccgcgcaccttcaggagcatgactgggtgagcgtcgacgcgacgctcgtacaaggcacgtacggcatcgccgggcatacgcggcaggggccgatgctgaagatcacgtcgctgcacaccgccaaagccgcgcccaccggctatttctactggcagtgaccgtgctttcggcggcaatccccgccaccgaaagcacggtcggcttttgctgcggctgctgcgtcaccggtgactgctacgacgactccgactgcgagcacggctccaccgaggagtgcgagggcaaggcctgcgtgcacacctgccacgagaaccgcgaaagtcacgagtgcgccttctgccacctcgccttcgacaccagcgagaagtgccacgaggaaatcctcgccgacctcaaggaactcaaggccgaactggccgcatgatataggcgaatggcggcatggagggaccgagtggcatcccttcgcgccgccattcgtcgttatcggctcctccgcgcgcgagtgccacgccgccggaccaccccagtcagcccgcggccgacagccctccgccagcaggggcgaatccacggaaaggtcagcgattttcctgacaatcggggcataggccgaacacctcaagggtatgcgactccaccgtgaacccatgcccgtcggccaccttgcgcacccaggattcgctcggcggatcgatctcgatcgtcttgccgcatttgcgacacaccagatgatgatggtgggcatcatcgccgcacaggcggaacagctgctgcccatccatgcgcacggtatccgccgctccggaatccaccagcgagttcaactgccgatacactgtggcgaggccgatgcgcagtccggaatccaccagcttgcgatgcagctcctgcgcggaaatgaaatcatcacagccgcgaagctgcgccatcacggcatccttctgcttcgtatgcctcaccggcccgttcgccatcacacgctcctcaagcattatcatttaacaaccattaatgataatagcgcaatccacggcgacatgcgagcgcgccgcacatacaacgaaacgaggggcggacgccgcagcgtcacgcccctcgctcccgaaccgccaaaactaccggagactacttgaggtcatcccagcagccggtggcctccaacgcctcgacggtcgccgcagtgtcatccgtgagcacggtgatatgacccatcttgcggttatgacgcacctgcgccttgccgtaatcgtgcacgttccactcgggatagtcggcaatcagcgccctcgtgggcgcgacatgctggccgagcacgttcaccatgaccgccgggctgagcagcttcggctggatcagcggccagccggcgatgccgcggatgtgcgcgtcgaactgatcgatcgagcacgcctcgatggtgtaatgccccgaattgtgcgggcgcggtgccagctcgttgacgacgacgcgaccgtccttggtgatgaacagctcgatggcgagcgtgccagccagctcgaagccgcgggccagggccagcgccatctcgtgagcggtgcgcgcgatctccgggctcacctcggcgggggcgatcgtcatatgcaggatgttgttgcggtggtcgttgcgcacgatcgggaacgtgacgtaatccttgccgttgccggacacgagaatcgacgcctcgaacgcgaaatcgacgaacccctccaggatggacggtgggaagccgccgccgcggtcgccgcgggcgcgaatcttctccaggtcgctgtcattgcgcagcacatgctggccgtgcccgtcgtatccgccggagcgggtcttgagcacgcacgggtaatgcaggtcatcgatggcggcgtcaagctcctcgaaggtgttgacctcacgccagggtgcggtctcgatgccgtgcctgttgatgaaggtcttctcgtggatgcggtcctgggtaacgcgcagcaggtcggtgccctgcggggccgcgaccaggtgacgcacctcgtcgatggattcggcgtcgacgttctcgaactcataggtgagcacgtcggacttctccgccagatcatggatggcggtcttgtcgtcgtactcaccgacgacctggaaatcggccacctgcgcggtcggacagtccggcgtcgggtcgagtacgccgatgcggaagcccatgtacttcgcgctcaatgccatcatgcggccgagctgtccgccgccgatgatgccgatggtcgctccgggctgcagcatcttcaccgcgccatgggtctcctcagacaagctgggcattggattcggccaccttctccttgagagcgtcacggtattcctgcagcgcgtcggcgagacgcttgtcggtcgtgctcaggatctgcaccgccagcaggccggcgttcgtcgcgccggaattgccgacggcggtggtcgccaccggaatgccgccgggcatctgcacgatggacagcaacgaatcccagccggagagcgcatgcgagcgcaccgggacgccgatcaccggcagcgtggtctgggcagcgaccatgccgggaaggtgcgcggcgccgccggcaccggcgatgatgaccttgagaccgttgacacgggcgccgtgagcgaattcggccatcagttcgggcgtgcgatgggcggagatcacctgcttgacgtagggcacctcgaactggtcgagcatgtcgcaggcgtgcttcatcgtctcccagtcgctggccgatcccatgatcacggcgacttcgggcttgctgtctgtcataagaagaacctcctcttggataccgttacaactgtacaatcccctatatcctcaccacgaccttgccgaacacgtcgccggaaagagccttggcaaaggccgcgcgggcgtcggcgagcccgaacgtcgagtcgatcaccgggtgtatgtcggcatgttccacgaagcgcagcaggcgggcgaaatcctcgcgcgagcccatcgtgttgccctgcacgcgtatgtcctggaagaacacgcgggtgagttcggcgcccggctggtcgccggtggtggcaccgcagatcgcaatcgtgccaccggggcgcacggaacgcaccgaatgcccccatgtggcggcgcccaccgactcgatgacggcgtcgaccttgcgcgggaggcgcgctccggcctcgaacgcggcgtccgcgccgagggccagtgcacgctcgcgcttggtctcgtcgcgcgaggtgacgaacacctccagcccggcggcgtgggcgagctgaacggcagcggtcgacacgccgccgcctgctccctgaatcagaatcgtgtcgcccggtttgacgcccgccgaagcgaacaccagcgagtaggcggtcagccagctggtgccgagcgcggcggcctcgtcgagcgtcaggttcgcgggcttggcgaacacgttggcgctgggcacctgggtcttcgcggccatcgtgccggggtaccgctcggagaggatcgtgcgccgctcccccggcatcacgccggccccatcggcgccgatcacggtgtacagcacgacctcgtcaccggccttgagccccttgcgcacgggaatgtcctcgtcgagcacgccggcggcgtcggtaccgaggatcatcggcgtggcctccgctgcgagccccacgcccttgaggctccagatgtcatgatggttgacggtcgcggccttgacggacacggtggaccagaacgggcgaggctgcggctcgggcagctcccccacctccagcgcggccaaggggtcggcattgttgatcgttgcggcaaatacggccttcattggcccctccttgttcggggatatccatcgtcgataccattcaaccacgcgcacacgcccgcgcggaggccgggcgcggcatgcgcaacgggagcgggacgcgacagacggtacaggcggaacggagccgcaatgcctcccaggactcctgccgtatacggagatgttgggggcattttctcgcaccggcggcccgatgcgacggcatcgattatcatgtcgcttttgaaacatccgaggaaaggacatatgcgtatgagcgtcggcatattgagtgcgattcacggaccagccgacgtgcatgccctcgacgccgcggagcttccggcgctgtgcggtgagatccgcacgacgctggtgaggtacggccatgtccacggcgggcacatcggatcgaacctcggcatggtcgaggccactgtagccctgcaccgcgtattcgactcgcctcgcgaccgcatcgtattcgacgtgtcgcatcaaagctacgtgcataagatgctgacaggccgcgccgacgcgtatctcgacccggcgcatcatgactcggtgacgggtttcaccaatcccgccgaatccgcccatgaccagttcgtgctcggtcacaccggcacgtcgatttccctggcgtgcggcctggcgaagagccgtgacctggcgggcggcatggacggcggcagcggcatacgcaatgtgatcgccgtgatcggcgatggctcgctcagttccgccatcgcgttcgaggggctgaacaacgccgccgaacagggcggcaacctcatcatcatcgtgaacgacaacgagatgtcgatcgcggaggatcacggcggcatgtacggcacgctcgcccgtctgcgcgctaccggcggcaagggtgggccgaacctgttcatggcgttcggactggactaccggtatgtcgaggccggcaatgacgtgttcgctctgatcgaggcgttcgaacaggtcaaggacaccgatcatccggtcgtcgtgcacatccacacgcgcaagggtctgggattgccgcccgccaaggaatccgcggaagcccgcgactccgggattcccatggagggtgacgccgcggtcgccgccgaggactcgatggtcttcgagggacgacatgaggcgaaccattggcaggatcccgacagcacgaccgggcggcctttgggagcgcgcaagcattacgggagcatggcgatggcggcattggaaccgcggttcgccacggaacctggactggtggtcatctcccccgcgacgccgggctcgaacggcatcacccgcgcgttccgggaacgggccggacggcactacgtcgataccggcatcgccgaagagcacgccgtggcgttcgcctcgggcatcgcacgggccggcggacgaccggtgctggccacttccgcgacgttcttccagcgcacgttcgaccagttgcagcaggagctgtcgctgaacggcaccccagtgacgctgctcgacttcggcggcggactgtccggagccgacaacacgcattcgggcgcattcgacatcgccatgttcggcaacatccccgggctgacctgcctggcaccgaccagcggccgcgcgttcctcgacatgctcgcctggtcgacgagccagagcaacacctctccggtcgtcatccgggtgccgggcgacacgattctcaaccgggagcgctcgggcgacttgcctggcgacgcgcaggacgtcacggacatgggctccgcggacgatacgtgcagtaatgcgtgcagcgaaaagaccacggccgatggaacagccacctgcccgtggtcccgttaccgcacgattcgccgcggcacgactgtggcggtcctggcattgggcaacacgctgccgttgggatggcgcgtggtcgaggctctggcttcggatgtccggcatccccttgatgccacactgatcgatccgcagcagttctccacgctggatgccgcgacgctgaccgagctgaccgggcgccaccgcatcatcgtgacgctggaggatggacagctcgaaggcggctggggagacaaggtcaccgccttctacgccaatgccgggctgcgcgacatgcgcgtgctgaatttcggcgcggcgaaggagttcaccgatcgcgtgccgctcgacgcgctcaacgagcgttatggcatgaccgtcggcaacatcaccgcgcgcatccgcagcgagagccgaggctgaaagccgcgcttatcaggccccgtcaggcccacaaggacgtcgaaaaggaacagaaagcccgttggaaccttattgattccaacgggcttcaccgtgaccccggacgggctcgaaccgtcgaccttgagattagaagtcacatgctctatccagctgagctacggggccgaacaacgaaagaacagtgtaccatcaccgcggcacgttcagggatatgtgtccgcgggcggcgcggcaagtcatatccgccgccccctcaccagtggtcgggaaccactgcgccgcagtcggggcagcatccgtcgggtccgatgcggtcggacagtatcgcgtaccagtcgcgcacgatcaggctcgccccgcacgccgggcagaatgtggtgtccgctccagcagcgcgtaggcgagggcggcgaccgaaccggagtacacgtatccggcatgcggcacaatcaccgccttcggagccccctgcggcagacgcggcgcgagggacgacaccagtctgcgcgcatggttcatctgccggtcaatcatggcctgcagttcgccggcgttggccggatagaacgcgccggctacggcggccgggcggacggtgccggcctccttgccggaatcggaaacaaccatcatcatgacgcctcctcacatctatctccatcgtagcctcgcgcggcgtcaacggctacggggacgtggccggccctgcacgactccccgcacgagccgcggacgaaaccggcatctcctgttgcgtcgctaagtgcgcgccgaaacgacgagtacgcgaacataggaacgcaaatgatcctgtttgcgtatcaaagtgcgcacggtcgtcgtttcggcgcgcacttagggacgcaaaccggccgacaacgtcgcgcaggccgcgcgcgaacaccacatggcggccaagcctccacccccgcaaggccctaatgcggccaaatacgccgaactgcgctgattttcgatgatgattcagcgtgtctcctcgcaacgttactatcagactatggggaatgacacaggacgaatgccggccgcggcgaacgacggctcggtcggcagtacggccggcggcagcccggacgccgccgccccctatgccacaccctctttcgcgcacggcatcgttccgttcgaccatgagatctcatcgaaccagcatctgacgttctcatacgccgagcaatcattcgcctcagcgaacatcccgtgggatccggatcatgacgcgctgcatctcaaggagcgcggcatgttcaccaacaccgcgctgatcatctccgaccaatgcccgttcaccatcaaatgcgcgacgttcgacggcgacgtcaaggcacccatcagcgagcgcatcgaactgagcggctccatgatcagacagctcaatgacgccatgacgttcctgaacgggcacaacagacgcgacgacggccgccaatgcccaccggacgcgctgcgcgaggcgctggtcaacgccgtgctgcatcgcgactacgcattccccggcccgactctggtcaacatcttcccaagccgcgtcgagatcgtgtcactgggtgggctgatggacggcatcgagatcaacgacctgctcaacggcatcagccagccgaggaacccctggctggccgaactgttcaccagactgggattcagcgagaattacggcaccgggatccgccgcatcatggaggaatacgacgaggcctccgacaacccgcagatccgcgtgggcacgtcctcggtggtgatggtgctgccgttgccgtcgcagccgtcgccgggtggatcgcgcacgcgcggcgacgccacaaagggcggctccgcacaaggcgccgacgggcacgacgccgcccaaggccacgcgaagatgtacgcattccccaccataatgacgacggccaccagcgacccgaccgtggctctggccggcacacgcgtcatcgggtgcgtccccgtgcgcctgtcggacgggtcggcgctgcgcacgtcgccgctcatcgcgccgggacgcatcgcatctcccgcggcaaccgcccaactgccgccgaacgccggacagacgctcgaagaagtgaccctgcactgcatcgcacaggccggcgtgccgttgagccgccagcagatagccgacaatctcggcgcgaccaagaaccagatgacgtacgtgctgcatcatctggtcgagcagggactggtcctcaaacgcggcagatcccgggccacgcgctacagcatgccctgacgcgggcgccggcggagattccccaccgaaaattcaatttccgttcatctgcgctccaaccgcaggcagtcatcccctcaactcggcacagtagtctcaagactggttccgaaacaaggagatagtaccgtgcaatcctcggtgggcgttcgcgaacgcatcgatcatgtgtatccttccctgcgcccggcggaacaggcggtcgcacgatacgtgcgttcccaccttgacgaggccgcggggctgacggtcggccagctcgcagaagtctcccgggtcagtcagcccaccgtcatccgtttcgcccgcaaactgggcttcggcggataccgtgagctgcgatacgtgctgcgccacccgcaggaggaacgctcggtgaccttcgacccgctcgaaggcttcgacctcaatccgtgggacaatcccgacgatgtgccgggcaaggccatgacccgggcgaagacgctcatcgacgagctgcattcggccatggacggcaaggcgctgcacaaggcgacgacgctgctggcgcaatcgaggatgatcgacatctacggcgtggagaactccatgtctccggcgctcgacctgtgcaccaaactcacttatctgggactgcaatgccggttcaacgccgacgcctacctgcagcagatcggcgcggggcatctgacgaaggacgacacggccatcgcgttctctcactccggcagctccgccgacaccgtgaaagcgctgaaactcgccaaatccgccggcgcgcacaccatcgctgtcaccaacaacaccggcaccccgctggccaactgggccgacgtgacgctgctcaccggtcgcggcgacatggcgatttacggcaacgccatcttctcgcgcgtggcgcacagcatcaccgtcgacatgctgtacatgagcgtgatcctcagcgattacggccgattctccaccgagctcgaccgttccggccgcatcatcgccgaccgcgagttccgcggctgaccgccatcatccgcatatccgcaaggttccataagactgcacaatacacgcgaggttccatgaaggctcgcgttccgtgacgctcagcccattccacccccgcaaactacagaactacgtgcatcagccgtaatcgaactcgttgttcactctcctttcccccaactttccaccagatcggaatccggccgccccgcgggagccgatgatggaatcacggcgagaagttcgtccgtgacacaactgaacaccggacgggatgccataggcatcacacgcaatggcgccgcatcaggcggcgcgacggaaggcaagcgacgaaatatgctcgactcagccgacggtgttaccgtagacctgcgcttgcaggtccttgcgagaggtctccaatttggtgatttcgccgagcagttccagtttttccgagccttcgggcatgccggccatgcgccggcgcgccgcagcgatgcgccgcatgtatcccatgtccagaagacgggccaacagttcggcggcgtaccgggtctcggcggggctcgccggacgcagctgcacggccgccgcattggcagcgcccggcacgccggatccggcgacggcccgatcctgatctgacggaggcaggggcagctgcagcaccgcgagctcattgatcaccgtcgtcagcgtcaatccgccggccttgttgagattatgcatccacaacccctgcggcgcatcatccggcggcaatccgcccgcggcctgaatggcgaggaacaacgcgcggaacaccggggcgacgaacgagtcctcgttgagcgacgcgaacatcgtgcggttgatggcacgcggaatctgaatcagcgtggccatgaactgctgctcgcagatgaacaccgcatcgtcgatgcggaaatacgactgctctgtggcggctcgatgctccaacgcccggcgttcggccggattcgcatacggattcgagccgggctcgacacgaggctggcctgcgccctcgccgttgcccgcgccgaaacgacgccggggcgaataggcgtcctcgtcgcgcacatgcagctggccgtgcgccgaacgcacctcgcgctgcatgatgtccagatccaccccgatgcggcgcgtcgccttgcgcgcatacaggtcacgctgcgaacgatcgcgaatctgggcgatgagcggcgccacagccttcaccgcgcccatctgcccggtggcatacgtggtgtcgaaccggccaatcgcggcatcgatcacaaaatcatacaacggcttcgcatgctcgatcagcgagcgcaccgcctgatcgccacggttgatgcgcagatcgcacgggtcgagattgtcgtcggcaacggcgacgaacgtctgcgacaggaacgccgaatccaatccgaacgcgtgcagcgcggccttctgccccgcggcatcgccatcgaacgtgaacacgatgcgcgagctcaatgcctgcccgggaacgttcagcgggccgaccagctgcaccgcgcccagcgaatcatcggcgaccagccgccgcacgatcttcgcgtgctcggcgccgaacgccgtgccgcaggtcgccaccgccgtatcgatgccggccagatgcatcgccatgacatcggtgtaaccttcgacgatgacgacctgacgcttcttcacgatggacgacttcgccaagtcgatgccgtacagcacctgcgtcttacggtacagctgggtgtccggcgtgttgatgtacttcgcggcgatctgatcgtcgtcatacagcttgcgcgcgccaaagccgagcgtgcgcccggtcgaatcacgaatcggccatgtggcgcggccgcggaaatagtcgtacacgccgcgctgcccctgcctcgcaagcccggcgtcaagcatctcctgctgcgtgaaccccttggacgcaagatagcgaaccagattgtcccacccctgaggcgcgtacccacagccgaaacgctcgcagtccgcccggctgaaattgcgtccgccgagcagcttgcgcgcggccagagcctccttgctcatgatctgcgacatgaaaaaacgctgagcctcctcgttggcctcgatcagcctggcccgcttcgacccggaatgctcggtgcgcccaccggaattctcgtaatgcagctcgatatggtatttatcggcgagaagctccaccgcctcgcggaaatcgatgttctcctgatgctcaacgtagccgaacacgtcgccgccgagaccgcagccgaaacaatgccacacgcccagcgcaggccgcacggagaaactcggcgtcttctcgtcatggaacgggcacaggccgacgaacgtgccggtgccggaaggccgcagcgtcacgctcgcggacacgatgtcgtacaggtccgcggcggcgcgcaccttctccacgtcttccttcagaatcattccagccatagcccaccagtctaacgtcagccgtgcctgaggccgccgcggccgtcacaggatcgaatgcaacgcaagggcggagctgtcggtgagggaggccacctggtcgaccgcgacgcgcaggcgctcgccgtcgttcgtcgcctcgtcccaatcctgcaggagcacggcctccagcgcactggaagggcgcggagaatcggccatgagcacgtcgatgagatcgttgatgatctggcgttcctcctggtggaacggctcgtgctcgcgaggagccatcacgaagtacacggcgatgcccttgagcgccacgatttcgtagctggtctcctcggggatcaccacgttcgccgaataccgggtcagaggcccgtcgccgtacgtgtcgcgggtcgcgttctccaccgaccatgcgaagcgtccgatcaggtccgaggtgatgttcttcagttgcgccagcgcctggcgcgacccgtcgaagtggtcggggaacatgcgcagccgccgcagccttccgaacgcccgctccagctcgtcggcatcccatttcgagccgtaccatgagcgcgtcgcttcgatgatgcggccgatcattcgcgggtcggcgagcgccagcgggttgaacgcgccggtcgctatggcgtcctcgacgtcgtggacgctgtaggcgatgtcgtcggacaggtccatgacctggcattccatgggtttgcgggcttcgggagcgcctgtcttcagccagcggaacacgtcctcgtcatccgggtacacgcagaacttcacgccgcggccaccgtcgtacttggccgcttcggcgagggtccacgggtatttgacggccgcgtccagcgaagccctggtcaggttcacgccggccgaccggccgtcggagtggaagaccttcgactccagccgggtgagcaggcgcagcgtctgcgcgttgccttcgaatccgccgatgtcggcggcgatgtcggcgagcgcccgttcgccgttatggccgaaaggcgggtggccaagatcatggcacaggcacgcgcaatcgaccacatccgggtcgcatccgagcatggctccgacctgccgtccgatctgggcgacctcaagcgtgtgggtgagcctggtgcgggcgaaatcgtcggtgcccgcgacgaggatctgcgtcttcgcgccgagcctgcgcagcgccgacgagtgcacgacacgggcgcggtcgcgctcgaaggcagtgcgcgatttcgacttcggcggctcgcccgcccagcgctgctcgtcgaatgcggtgtacccctcccctgctggtatgcgttcgccgctgtcctcggatttcatgggacctcccttgccgtcgccacgttccggtatccagtttagcaaagggttccttggacggagccggtcacgccgtcctcgcaatgcgtgcaatgtacgcgacgcgcggcgggtctacagcaggctcgccggatcgagcttggcgaggtccgcggcaggcagcacatcggcggcatgcaggtagagcctcgggatgcgattgcgcagacaggtgaacacctcgtagctaatcgtgtcggcggcgcgcgcccagtcgtcggcggtcggctcgccgtattgctcaccgcgaccgggcccgaacaactccacggtgtcgccctcatggacgccaagctcggcggccgacccgtgcaggtcgacgatgaactggtccatgcacacgcgaccgcacacgtgcagcaagcgcgggccggcgctggtcatcacacgcacggggccgccggccttctcgacatgcttggcgccctgcatgtcgaagccggacgcggaacggtggatgccatcggcgtagccgaggggcacgatggcggtgctggtgttgtcgggcgtcaggtacgtgcgaccgtatgagacgccgtgcccggcctccacgtccttgaccgtgccgagctgcgcctgtaatgtcatggcgggcttcagatgccagtcgcgcggcgtgcccatcgccgggtcgggctcgtagccgtacagaccgatgcccggacgggtcagttcgaaatgaatctcgggacggttgagcgtggccgcagtgtttgccagatggcgtatttcgggcgcgatgcccgcggcttccatgcgacgggtgaattccgtgaacgattcgatctgccggtcggtggaggcgacgaattcaggcacatccggcgagtcggcgaccgccagatggctccactggccgacgatgtgcagcacgccctcatgcgcaagcggcaccagcttggcaagggccgcgtcgaatccggccggcgtgaagccgttgcggccgaagccggagtcgaccttgacatgcacgcgtgcgggtttgccgagccggcgcgcggcgtcggcgagcgcgtcgatgcccgccagcgagccgacggagatgtcgatgtcgttgtcgatcagctcgtcgaacggcacatccatgccgttgtacacccatgtcagaatgcggcagcggtccgggccgatgccgagtttgcgcagcagcagcgcctcatgcgattgcgcggtgcccagccaggtcgcgccgcccgcgagcgccgccagcgcagccggcagcagaccgtgcccgtaggcatccgccttgaccacgcccatcaccgccgtgccggaatgcgggccgcccaccacatcgaccaagtgggccatgttgtccctcaacgtggccaggtcgacgatcgcctgcgcggggtaccggcgtcgcgccgcccggtagttggcctcgccagccggggatgaaaactgcaattcggatgctgcgttcaaagtcatggctcttattgtggcgcggcatgatgacgaatgccggagcgcgtcgcatgacggcacgaatccgacctcagccggcagcggcgttgtccggcgcattgccgtatgctgtatgacgcatattcgcggcgtccgcggtcgaccgccgccgcatcagattcccggcgttgaggcgtgccggggtcccggaacgccgtccggtacagcccaatccattccatatattgagagaagaccatggatctgtttcgcaagaaatcggtggatcagcttgtcgccgaatccaccccgctcaaacgcacgatgcacacgttcgacctgacgatgctgggcatcggagcgatcatcggcaccggcatcttcgtactcaccggcaagggcgcgctgaccgccggcccggcgttgatggtgtcgttcctgctggccgcggtctgctgcggcttcgccggcctgtgctatgccgaattcgcgtcgatggcgccggtttccggctcggcatactcgtacgcctatctcgcgttcggggaactgatcgcattcgtgatcggctgggacctgattctggagtacgcgctgcaggcggccacggtgtccgccggatggagcggctatttcaacaagctgctcgaagggttcggactgcatctgccggtcgagctgaccgccgcgtacggcaccaaccccaatacgaccacatacttcaatcttcccggtttcgtgatcgtgctgctcatcacctgggtgctgtcgatcggcatcaaccagacgaagaaggccaacgacatcatggtgctcatcaagctcgcgatcatcgtgttgttcatcgtgtgcgtcatctggtatgtcaacccgtccaactggaagccgttcgcgccgtacggcatctaccagttccaacccggttcgacgcagccgtatggcatcgtgccggccgcgtcgatcgtattcttcagcttcatcggcttcgacgcggtgtcgtcgtcggccgaggagaccgtcaacccgaacaggacgctgccgcgtggcatcctgtattcgctggtcatctccacgatcctgtacatcgtgatgacgctcatcatgaccggcgtggtgccgtatgagcagttcgcgcagttcatcgacgcgccggtggccggcgtgatcctgaagaccggcatgaactggctggcggtgatcgtcaacctcggcgcgctgatcggcatgaccacggtgatgctggtgcagctgtacggccagtcgcgcatctgctacgcgatgagccgtgacggcctgttcccgaagttcttcggcgacgtgcatgacaagtaccgcaccccgttcaaggggacgtggttcttcggactgctgaccgcgttcgcgggcggcttcatcaacatcaacgtgctgttcgagctggtgaacatcggtacgctgtccgcattcatcattgtgtcggccggcgtgatgtggatgcgcaggacccagccggacgcgcatcgcgggttccgcgctccgggcgtgccgttcacaccgattctggcaatcgcattctgcatggtgctgatcgccggtctcaattgggagacctgggtgcggttcgcggtctggttcggcctgggactgatcgtctacttcgcctacagccgcaagcgctccaagctgaacgcatccgacgcggaataacgtgctcccgctggcaggggctgtcgcgaagcaactgggggtggtcttcacggccagtagtgcaccagaccaccctcggtctcgctgcgcgcgacagctcccgccagcgggagcacgttcggcgactgaggagcaacgcaggcgacgcgccgttgtttcgtgccgggcgttaccactcgtgacgctggtatgcgatccttgtcgtatcggtgggccggtcaagcagctgtatcaggccgcagcgggcgaatccgctggtttcgaggacgtgctgcatggccttgttgttggggtgggtgtcggcgcggacgttgccgtaatgcttgagggcccaggcgatgcagtcgcgggcggcatgcttgacgaggccggaggacgcgatgcggtggatggtgacgtaggaatcgtcgtcgagccaggcgccgtcgatgtgatggtaggtggggtcttcgccggggcatagcgcgaattgcgcgaggatgcgctcatgtccgcccacttcgtcgacgagcagcatggcgcgtcgctgcgcgatgtcgtcgcgtacgacgtcatctttggggaaggtgtcgccccattgggtggggttgccgttgcgtgccatcagctcgcgggcgcgcgcgtagttcttctgcatgtgcgggtagtcgcgcatggtcgcgtgtcggaatcgccgctgggaagcactgtcagtcaccggtcacctcatgttcgtgtgttggacaactggccgtaaggctatcatgggcactcgtccgattggagtgcatgtgccgtttaccggaagtcgttatgatgagggcggcaccggtccgataccgatgccgccctcatcccataacccggaccaatgccgggaatacggctgtgtcggccagtcccagcctcagacgaccttgcgctcgaacgggtcggagctgatgcccttggcgaggatgtccttgcaccactccttggcggtgaacaggctgtggtcacggtagttgccgcagctttcgatggtcgtggcgggaacgtcgtcccacgtggccttgtatgcgatgaattccagcgattccttgagggcgcgggccacatcctcggtggagtgcgtgccccaggtcagcaggtggaagccggtgcggcagccgaacggagagcagtcgatgtagccggggatgcgttcgcgcagcagcacggcgatggtgtgctcgatggtgtgcagacctgcggtcggaatcgcgttctcgttgggctgtaccagacgcaggtcatagttggagatcacgtcgccgttggggccggtctctgtgtcgatgtaacgcacgtacggcgccttgaccttcgtgtgatccagctggaaactttcgacaatcggcttttcttctgccatcgcagactccttttgctcgatatgacgccggcgcgtacgaccgttagccggcattccatcgaccattgtctcactatcgcgcgcgtctcgccgcattcttggctataggcgttcctcatatacggcatatacggcacgaggcgagtccggtgcgctgtaacggcgctgtcaatcgtcgaagccggcgatggcctccatgaatcgcttgccgtatttggccagcttgctgtcacccacgccgttgacggcgaggaactgcgcgtcggtgatgggacggagacgggccatgtcgcgcagcgtgcgatcgttgaacaccatgtatgggggtaggctgttctcgcgggcgatggacagacgcagttcgcgcagtttctggaacaacgtctcgttctcgtcgtcgggggcgtacgagcccaatgccgggccgtccgacgccgcggatttcgaactggaatcggtccgtgacgtcacgcccgttccggcgccggcggccttgcgctcgacccgtttgatctcatatcggaattcgggcgcgaccgtttccgccgcgcgctgcccgaagccgacgatcggcagccgcccttcggcgatggagaggaatccgtcggtggccatctggctgagcacgtcgcggattcgggcttcgggcgcatcgtgcagacgaccgtagctcgggcacctgtcaagatgccgcgcgatgaggtcctttgccttggagccgcgcagtatcgccacgattttccccgagccgaggccttggcgcacggggccgcacgtcggtcgcccctgatcgtcgtaatcgtacatggcatcgtgcacgcatcggctgattgaccgcgcgatgtcggtcacgtcaagggtttcgaacgtgctgtcgcaattcgtgcaaccgcccgtgcatgtgccggttcttgacgtgttctcgccgaagtagcgggtcatgtagacgtgcaggcagtcggtggtacggcagtagccgatcatgccgtccagcagacggcgcttgctcatgcgcacggtctcgcgctcttccggggtcagccgttcgttgtcgttgtccatgtcgagcaggcgccgacgggtgacgatgtcggattcgttccacagcagtgtgcatcggctcggctccccgtctcggccggcgcgaccggcttcctgatagtatgcctcgatgctttccggcatgttgtggtggatgacgtagcggacgttcgacttgtcgatgcccatgccgaacgcattggtggcgacgactaccggcacggcgtcggtgacgaagtcgcgttgcgcctggttgcgtacgtcggccggcattccgccgtggtaggcgaccgcgacggggccatcgcgcatgacggagtctgccgcactgccgcccgccgctccgcgcaacgccggcacggtgtggttgagggccgcggcgagtgcctccgtctccttgcgcgtggcgcagtagacgatgccggattcgtccggatgctcggctacgtatcgtgcgacccatgccgccttgtatttggtctcgatcttgagcacatcgaagtacaggttctcccggtcgaatccggtgacggtgacttgcggggcgttgagccccaggataccgatgatgtcgcggcggacgcgctcggtggcggtggcggtgaacgcggctacggtcggccgggccggcaggccggcgatgaactcgccgatgccgaggtacgacgaacggaaatcctgtccccattgcgacacgcagtgggcttcgtcgacggccaccagcgagatcggcacgcgtgtggcgaagttgcggaaccgttcggtttccagtcgttcgggggccacatacagcagtttgatgtcgccttgcgcggcctgcgccagcaccatggcctgctcgtcgccgccctgggtggtgttgacgtatgcggccgggatgccggcgtcgttgagcgcgtctacctggtcgcgcatcagggagatcagcggggagatgacgatggtgacgccgggcagcaacgtggccggaatctggtagcacacggattttccagcgccggtcggcatcacgccgagcacgtcgcgcccggcgaggatcgcgtcgacgagccctgactgccccggtcggaacgagtcatagccgaaataccgtttgagcgcccccagcgccgccacctgatctgtcatgcctcccaacattaccgcattccggccaccgttccttcgagtacagcgtcgggactgcctctctccccttctcttcccttctccgtcgtcccaaaagcgtcgctaagtgcgccgaaacgacaagtgcgcgcacttatggacgcaaaccgggccttgcatgcatgcccgtcggcgtgccgccgaatcagatggcggcgaaggcctgctccaggtcggcgatcaggtcgtcggcaccttcgatgccgacggacaggcgcaccaggttcgcgggcacctccagcgtggtgccggccactgaggcgtgggtcatcgcgcccgggtgctcgatcaggctctccacaccgcccagcgactcggcgagcgtgaagatctgcgtggcgccggcgaaccgcttggccgcctcgaaaccggccgcgagctgcacggaaaccatgccgccgaaaccgccgtgcatctgacgggccgcgatctgatgccccgggtgggattccagtcccgggtaccacacgcgctccacttccggacgggtttccagccattgcgcgatcttcagcgcgttctcgctgtgacgctgcacgcgcacggccagggtcttcaggccgcggatgtccagccacgagtcgaacggagatggcaccgcgccggcggcgttctgcaggaacgcgaccgcgtcgcgggtttcttcgtcgttgagcacgatcgcgccgccgaccacatcggaatgcccgccgatgtacttggtggtcgaatacacgaccgcgtcggcaccgtcgtcgagcggatgctgcagcaccggggaagcgaacgtgttgtccaccacgaccttggtgccgtgccgatgcgcgacgtcggcggtcgcggcgatgtcggtgatgttgagcagcgggttggagggcgtctccacccagatgtaccggtattgcttgacttcaagcgcggcggcgacggcggccgtgtcggtgatgtcgaccacgtcgagcccgatgccccacggcacgaacaccttggcgagcagacggtaggtgccgccgtacacgtcgttgccgagcaggatgttgtcgcccggcttcagcgtggcccgcagcagcacgtcaatcgcggcaagtccggaagagaagctcagcgcgtatttcgcgccttcgacggcggcgagctgcgcgtcgaagctgtttcgcgtggggttgacggaccggctgtaatcgtagccgttacgcagtccgcccacaccgtcctgcttgaacgtggaggtcatgtagatcggcgtgacgacggcgccggtggtcgggtcgggctcctgcccggcgtggatggcacgggtggcgagcgtggtgttggcgagggctgcggcgttggtggagatggtgatggtcatgatggttgtttccttatattgcagtttgctgtattgattcgatattgaaatattgaagttcgggttcgcggacgcggttcagaaggggctttggccgggccttacaggtactgttcggcaagtgatggcctggaggtccgctcgacgatgtcgccatagccgttctcgcgcatccagtcgtcgttgaagatcttttccagatagctgcggccggagtccggcagcagcacgacgactacctgattgctgtccagatcgtgctcacgcgcgtatttcagggcgctgacgacggccatgccggacgagccgccgacgagcagtccttcctccgcggccaggcgacgtgtcatctcgaacgcctcgcgatcggtgacctgcacgatatcgtcggtgatgttccggtcgaacgccttcgggtagaagtcctcccccacgccttcgatgtcgtattggtgcacgtcgctcgggtcggagtagatggagccttccggatcggagcccacgaccgtgaccgcgccgtcagaaacctccttgaggtatttgccggtgcctgagatcgtgccgccggtaccgatgccggccacgaaatgcgtaaccttgtggtcggtggctttccagatctcggggccggtggtgtagtagtggctcagcggcccgttggggttgtcgtactggttcggtcggaatccgccgggaatcgtgttggcgaggcgctcagccacctgatagtaggaccgcgggtcgtcggggcccgcatcggtgggggtgacgacgacttcggcgccgtatgcgcgcagcacggcacgcttggattcggagactttgtctggcagcgtgaagatcgtacggtagccgcgctgctgtgcgacgagcgcgagcccgacgccggtgttgccggaggtcggttctactatcacaccgccgggcttgagttgtccggagcgttcggcggcgtcgatgatacgctccgcgatgcggtccttggaggatccaccgggattgaaatactccactttgacggcgatggtcgccttgatgccgtcaatgacatgatgaagctttacgagtggcgtgttgccgatgagttcggagagattgttgtggatggtcatcgtggatcccgtttccttctgcgtttcgattggtgctttttcggtttcgtataccgggcggatgggttgatcgcagttgaaacaggttggtgatggctttcgatgatgtccggactttgccgtttcgctgtatgaccagcgaacgcatatacgtatgatgcgttatgtcaatcgaggaatcatcaggaatgaaccgtatttcaagttatgcgtcgtcaaccgctcgcccgcaggcgtcggtcagcgacaacaacatgaaaaatacgtcatgtttgacatagtatcagcatctcagaaagacacgcgacagcgcatccacaatgtgatatcagatgactgccgtcattgcgctagcccataaattgcatagcggcgtgagtggacccatcgaatgtcatttcgacgaatccactcacgtaccggctagtctttcacctgttcgtacacttgcgcaggtgtcagctctgatggaagctcatcccccgaatctacgttgactcgctcaaataccggctgccatgcatcagaagcgttaccatgttgagaccgcaaaacgttccacgattgttgcgtatcgtcggtcactcggtatacgccggcagtcgcaccggtcacatagtactgagatgactgttctccaggcaaatcggtcggcgtaagaaacaacatgaccacgtcaccggtctgcagcagagtctccgcgctcccctgctccgcggaaccagtctgacgtacaataatgctgccactgttgacggttcccttaagcgtctgcgagaccttcacgtcaagtaacgtgaaatcagtaatatcatcaatatcccgaatcacggaagttctcgatatttctccggtaataatcaggggactatcgtcctcaagttctaccatggattcataaatgcgtacccgcgactgagaagcatccggcttgggaacattagattgtgccgctgtctgaccgcaacccgcgcacgtaaacatcaacactaccaaccccataagggtcgttagccatctaatccttgaaatcttcttcatcgtgtcacctcaatatctactgttaatacctttgatatcatctgacgtgagatatctgacaccattgttgtaagcgtcagatgcactcttgtacatcactgtattgatcgtagaatgccccaatccccaacaatgagaaaactcatggagccaaagcactctcatgcgggcaaccgggtaagatgacttcatataataggtatttacacgcgaaaccgcgtctttagtatacccggacgctaaaaatgtataggccgattgtccttcccacccattcttgccgaaattctgagaagttgcctgccaaaccatccgcgttccggtcgagaatccaactttcgttgctgaattaatattggagacagcctgcttggccgaagtcaagtaattgcctttcaccgtggccataagcattacaacctggttcttattgagccaatgactcttgctataagaataggcactcgcgactggcaccatgctcatcaaaaataagaatgacaatagcgttgatactaaacttattggccacttcctgcagcgttgcagcttagacatcttcgcacctttctgataagaacggaaagttacagagacaggatttatatccgtgaagtagcaacacagcaacctatgctgttattaatttataatactcgatttataagaagaaagcaaaaacatacacaagaagggcccccgggggttgttggcctcgtccgggggtccttgtcgtgtggtgcggcggcgtgctactctcccacaccctgtcgggtgcagtaccatcgccgtgccaggccttagcttccgggttcggaatgggaccgggcgtctctcctgggccatggccgccgcaaatcttgggttatcggccgggaaacggggtttcccgccggcgtgtggcggttcggggaccggacaatggacgcggtgcgtgttgctgttgactgatcgtgcgcgtgtgaggaccgtgctccctgtgcgccttcgcggggccctgccgggtcctgcgccacacgcctcccgggcgtgtggatgtgggttgcctctcgaccattagtaccggtcggctccacccctcgcggggcttccacgtccggcctatcgaccacgtgttctgcatggggtcttcagcggctcggggccgcatggaatccttatcttggagaaggcttcccgcttagatgctttcagcggttatcccttccgaacgtagccaaccggccgcgccactggcgtgacgaccggcataccagaggttcgtccacccaggtcctctcgtactatgggcaggcctcctcaagattccaacgagcgcagaggatagagaccaaactgtctcacgacgttctgaacccagctcgcgtgccgctttgatcggcgaacagccgaacccttgggacctgctccagccccaggatgcgacgagccgacatcgaggtgccaaaccatcccgtcgatatggactcttgggaatgatcagcctgttatccccggggtaccttttatccgttgagcgatgccgcgcccgtgcgccggcaccggatcactatctccgactttcgtccctgctcgatccgtcgatctcgcagtcaagcccgcttgtgcgattacactcgacacccgattgccaaccgggccgagcggacctttgagcgcctccgttactctttgggaggcaaccgccccagttgaactacccgccaggcactgtccctgaacaggatgactgttcgaggttagacatcaaacgagaacagagcggtatttcaccttgcggctccgcggatgctggcgcacccgcctcgaagcctcccgcctatgctacacaatccgcgcctaatgccaataccaaggtatagtaaaggtcccggggtcttttcgtccttctgcgcttaacgagcatctttactcgtactgcaatttcgccgagctcctggtcgagacagtggggaagtcgttacgccattcgtgcaggtcggaacttacccgacaaggaatttcgctaccttaggatggttatagttaccaccgccgtttaccggggcttgaattcaccgcttcgcagaaagctgacggatcctcttaaccttccggcaccgggcaggcgtcagagcgtatacagcggcttgcgccttcgcacgctcctgtgtttttggtaaacagtcgctaccccctggcctgtgccaccccccgccgctcatcaccgcagggggtctcccttatgccgaaggcacgggagcaatttgccgagttccttgaccaggattcgctcgatcgctttggtattctctacctgaccaccagtgtcggtttggggtacgggcggcaacgcgcctgacgccgaagcttttctcggcaccacggatcaccggattcgggccgtaaggcccccatcatcacgcctcgccccgacgccccgcggatttgcctgcgggacgggctcgaacgcttgaccacggaaaaccacctccgcggccggctgccctgatgcgtcactcctgcgctgacctactacgaggggggatcccaacgcgcccgcgccgcgaccccccgaaaggggagacggcacggacccggaggttagcgccccaggcctcggttgtttcggttcgctgccggtacgggaatatcagcccgttcatccattcgactacgcctgtcggcctcgccttaggacccgactcacccggggacgacgaacgtggccccggaacccttggtcatccagcgggcgggattcgcacccgcctctcgctactcatgtctgcattctcactccccaacggtccacggcaggcttgcgccgccgcttcgccccgatggggacgctctcctacccagcatccaaacggacgctgccgcgtcttcggtggcgtgcttgagccccgctacattgtcggcgcggaaccactagaccagtgagctgttacgcactctttcaagggtggctgcttctgagccaacctcctggctgtctatgcgactccacatcctttcccacttagcacgcgcttggggaccttagacgacgatctgggctgtctccctttcgacgacggagcttatcccccgccgactcactgccgggatacgcgtcacgggtattcggagtttggctgctgtcggtacccgatacgggccctcaagcatccagtagctctaccccccggacgtaatccccgacgctgcacctaaatgcatttcggagagaaccagctatcacggaatttgattggcctttcacccctaaccccaagtcatccccccggttttcaacccaggtgggttcggtcctccacgcggtcttacccgcgcttcaacctgctcagggctagatcatcccgcttcgggtccaggacacgcgactcaaacgccttttgagactcgccttcgctacgcgtaccccacacgggttacgctcgccacgtgccactgactcgcagactcatttttcgataggcacgccgtcaccccgaaaggctccgacggtttgtaagcgcacggtttcagagactgtttcactcccctcccggggtgcttttcacctttccctcacggtactagttcgctatcggtcagacaggtatatctaggcttaccccacggtcggggcggattcacacgggattccacgagtcccgcgctacttgggaaacacgatccggagacgacgcgcgttcggctacggggccatcaccctctgcggcccggcattcaatccggttcgcctcacacgccgttttatcactccggccgggcccgccaggacccggacacacgctccctcaacaccacgcgcgcaacggctggcgcctgtcacacgcgcgcggtttggcctgatccgctttcgctcgccactactcacggaacatcctttcctgcaggtactgagatgtttcacttccctgcgtaccccccgcgcgaacgcggtgccggcccatgacggccggcgggttcccccattcggaaatcctcggatcaaagccctgctggcggctccccgaggcatatcgcagcctcaaacgtccttcatcggtactgtctgccaaggcatccaccatacgcccttgcaagcaacccgcacgacccatccgggaacggcgggaaaccgcaagcccacggcaaaaactccgctggcaacacaaatcatcacacaaatgatcacacacaaaacgatcaaacaccagactccgaagagtccggcgaaatcaacagcagaagacacccccaaaagggcgtcccctgctcgcgtccactatccagttctcaaaccaccacgcacccgcacgcgagcccacccaccccaccaggggacgggcgaccggcacggggcacggaacaccagccacgccaaacggcgcggggtggcggtccgggaacccaaaagcatgcccgcaccactcctggacgcaccgcacgaccggcacgcccgaaggccgactccactcttccacaccagcaacccccgcgcacccggcacatccggggcaagggggcacacaccggccaccagacagtggcctgaaatctccgtagaaaggaggtgatccagccgcaccttccggtacggctaccttgttacgacttagtcccaatcacgagcctcaccttagacggctccatcccacaaggggttaggccaccggcttcgggtgctgcccactttcatgacttgacgggcggtgtgtacaaggcccgggaacgcattcaccgcggcgttgctgatccgcgattactagcgactccgccttcacggagccgggttgcaggctccgatccgaactgagaccggttttcagggatccgctccatgtcgccatgtcgcatcccgctgtaccggccattgtagcatgcgtgaagccctggacgtaaggggcatgatgatctgacgtcatccccaccttcctccgagttaaccccggcggtcccccgtgagttcccaccataacgtgctggcaacacggggcgagggttgcgctcgttgcgggacttaacccaacatctcacgacacgagctgacgacgaccatgcaccacctgtgaacccgccccgaagggaaacgccatctctggcgtcgtcgggaacatgtcaagcccaggtaaggttcttcgcgttgcatcgaattaatccgcatgctccgccgcttgtgcgggcccccgtcaatttctttgagttttagccttgcggccgtactccccaggcgggacgcttaacgcgttagctccgacacggaacacgtggaacgtgccccacatccagcgtccaccgtttacggcgtggactaccagggtatctaatcctgttcgctccccacgctttcgctcctcagcgtcagtgacggcccagagacctgccttcgccatcggtgttcttcccgatatctacacattccaccgttacaccgggaattccagtctcccctaccgcactccagcccgcccgtacccggcgcagatccaccgttaagcgatggactttcacaccggacgcgacgagccgcctacgagccctttacgcccaataaatccggataacgcttgcgccctacgtattaccgcggctgctggcacgtagttagccggcgcttattcgaaaggtacactcacccgaaggcttgctcccaaacaaaagaggtttacaacccgaaggcctccatccctcacgcggcgtcgctgcatcaggcttgcgcccattgtgcaatattccccactgctgcctcccgtaggagtctgggccgtatctcagtcccaatgtggccggtcgccctctcaggccggctacccgtcgaagccttggtgagccgttacctcaccaacaagctgataggacgcgaccccatcccacgccgatagaatctttcccacaatcacatgcgatcatgtggaacatccggcattaccacccgtttccaggagctattccggagcatggggcaggtcggtcacgcattactcacccgttcgccactctcaccaccaagcaagcttgatggatcccgttcgacttgcatgtgttaagcacgccgccagcgttcatcctgagccagaatcgaaccctccacaaaaaaaaattgcaaaaggaaccattgaatgaccccaaaaattgacgcgacttcttaataaggaaaagaagtccgcacgaaaaaccccggcccccatcaagcgccctcgcgcacccacgggcaaacacccgcaggcgggaaccggactggcataaaatcaaccaaaaaagtagtacaaacacactcttgagttctcaaaccaccacacatcaacaagcttcgttctcaggaggagaagtccgccgtgctgagcagcaagagataaacatacacgggatgggcgaacaacgcaaaccgatgggcgcagggaagctaggaaccgttgcaatgacgcggttccttcggcgtgtcgcaaaagcctgttttttggctttctgataccagaatagacctctgaataccgctccacacggcactacactcactgtatttcggcgtgtcgcggattgttcaccgcccattcaccgcgtccgcgtcgccgcatgccgggtacagcgcgttctaatgtttcagtatgaacgaacgaaacatcatcgaaacccaaccggagcgcacggatctgccgctcatcgtgattcccgtgatcgtcgaatcaatgatcgagccgttcgccgccaacttccccctgctgcacgatatcgcccgcatccgcatgcactgcgatttcacgctggacaccgacaccatcctcgaacgcaccaaggatgccgaagccgtcatcgtcatcggcttccacatcaccgatgacatattggacgcgatgaccgttcggggccatgtctcgtgctttgcgttcggcggcaccggcgtcgccagctacatcaatcttcccgtcgcgcgcgagcgtggcatccgcgtgtgcaacgtcgtgcattacggcgaccatgccgtggccgagcacgcattcgccctgatcatggagctcgcccgacaggtcggccggcttgacgcggaggtgcgccgcggcgactggggcggcatcgacggcatcgggctgcacggcaagaagctcggtctggtcggattcggcggcatcggccggaccgtcgcccgcatcgccaatggcttcggcatgaagacactggtatggaacagccatgtgcacggcatcgatgggttggacatcaccctcattgacgatatggatgaggtgttcgcgcagtcggatatcgtcagcctgcatctgccgctgctcgacggcaccgcaggcatcatcacgtctcggcagctcgaccggatgcgccccggttcgatgatcgtcaataccgcccgcgcagaaatcattgaaccgggggcgttgacccgccggcttcaacgaggcgacgtgcgtgcggccatcgacgtgttcgaccatgagccgctgccgatggacgacccgctgcactccttggacaatgtcgtattgacgccgcatgtggcatggcgcgacgacgaggcctgcgtcaatctgacccgacaggtgatcgacgcggtggcctcgtatttcactggcggcgactataacgccgtgctgtagcaccagtcagctgtggcggcgcttgccgcggcaccgctacagtgaggcggcttcgataagacgagccgtatattcggacttgggatcgcccagaatgcttgcagtggagccgacctccaccacatgaccgtcgtgcagcacgagaatacggtccgctatatgctgcacgacgcccaggtcgtgcgaaaccatgatcagcgccgtggacggcctggcctgtcggatcgcggcgaacgtctccaggatctgcatgcgagccggcacatcgatggcgctcatcggctcatcggcgagtatcacgtccggctcggtgatgatcgcgcgggcgatggcgacgcgctgcgcctggccgccggacagatccattggatatcggtcgatgaacacgccggcatccaatccgacccgttccagcgccgcgtgcacgttctcgcgaatgcctgcggggtcgggcctgctcccccgccgtcgcagggacaacggctcggcgacgatatcgccgaccgtccatctggggtccagtgatccgtagggatcctgatatatcagtccggaatcgtggcgcagccgccgcagaccggagccgccacgcagcaccggcgtgccgcggtactccacagtgccgccatcggcgttctccaaccccagcatgatgcgggtcaacgtcgacttgccggagccggagccgccgatcacagcaaggcactccccctcatatacgtccacgtccacgtcgaacagcacctgatgcgcggcggcgcggcggccgaacgacttgcagatcgaccgcgcgcccaatacgacggcgggcctgtcgagtttccgctcggaaccacttgttgacggttccgtcatggagggtgacgcggcaacttgggatatacggaaatcgctcacgatgactgctccttatccccggcatccccggcatgcaatgtcagttcccgggcagccccgaccagccgccgcgtccgctcgtcgcgcggcgaggcgagcacgtcggcggtgcgccctgactccactatccgcccttcgtcaagcacatagcagtgtgtcgtcgcgtgggccagcacggcgaaatcatgggtgatgaacagcagtgacgcgcccatgtcatcgaccagggagaccagcaggcgcacgatctgccgctgggtgatcgaatcaagcgcggtcgtcggctcgtcggcgatgatgaaacgcggagaggtaatcagcgcagtggcgatgccgacgcgctgctgctgcccgccggacaactcgtgggggaatttgccgaggacgtcgtccggcagcccgaccttgcggatcatcgcacggacacgctcccgacgctcgacggcggtcaggtcataatggagccgcagcggtagtccgacctgcttctccacactcatcaccggattgagggatgcggccggattctggaacaccatgccggcgtaacggccacggatgtcggcaagacgcctgtcatccgtaccgaccgtctccatgccgcccatcactaccgagccggacaccacggcatgcgtcggcagcaggccaagcatcaccttggaaatcatcgacttgccggagcccgatgcccccaccaggccgacgcgctgcgcgtcggcgatatccaagtcgacgccgcgcacgatgggcgcaccgccgatggcaatgttcaggtcacgaaccgtaacgctcatcgcgcacctcgcaatcggggattcgtcaatgggtcggcggcgtcgcgcagtgcgtcgccgaacaggttcaacgcgaccaccacgagcgtgacgatcagccccggccacagcacggtcagcgggtacacgttgatgaacttcacggacgtggccagggagtgcccccaactgggcacgcccgacggcacgccgatgccaaggtacgtcagaccgctttcggccaacaccgcggtgcctgccgacagtgacagctgcaccgtcagcacaggcgagatattcggcaggatatggcgcgccagcacgttcagtcccgaagcgccgttcgacagcgccgactcgacataggacgaacgcgcggcgagcatcgcctgagggcgggacacgcgcgccagattcaacccgtatccgaatccgcacgcgatcacgatgacggccacggacggaccgagcggcacggcgagaatcagcgcgatcagcaccgtgggaatggatatcagcgcgtcgacgacgaccaccgatgccgccgaaagcgccgcgtgcctggacaccatcaacgccacgatggccagtccgaacatcgcagcgacggccacggtcagcacgacgatcagcaggttggtgcgggagccggccagcaaccagctgaacacgtcggcaccggtgccgtcggttcccagccagtggtcgcgcgacggcttcgcccacacatggtagccgtcggtgctccacagcgaatacggggtccagaccagcgacaccgcggatgatgccagccataggccgagcacgatcagcgagaacttgcccgcggcgtggccccacatcgtacccagaacgacacgtgcggcgcacacgccgcgggcagtgcgggcacggtcttgcgccgtcgtcgcgctgttcccggaagacggttttccggctccggcttgagtcttggcatcgatcggtcgcgtcatgcgttcacctccgtgacatcgtcagccgacttcagccgcgggtcaagcacccgatgcagcaggtcgaccagcaggccgatcagcaggaaaaaagccgccagcatgaacagctcgctctgcacggcgatgagatcacggttgccgacatcggtcaccagaccgttgccgatgcccggcagcgcgaacaggttctcgatgaccatgacgccggtgaccatctccgcgaacgtcagtccgatgacggagaccagttgcggcatggcgaggcgcaatcccacgcgcagcaccgcctgtcggcgggtcatgccacaggacatggccatgtcgatgtaaccggaggatgccagtccgcccaatgccgagcgggtgtaccgcatcagcccggcccccacgatgatgcccaccgagcaggctggcaacaccagcgacatcagcgccgaaccgaaatcggaccacccgccttgggggaatccctgcgacggaaacacgccaatcagtccggttccgcgcgagaacaacaggatcagcagcagaccgccccacagcgcgggcacggcgccgccgatgatggcgaccatgtgaaacatgccgcgagcggcgcggctgcgggccagtgtcgcctcgcatcccagcggaatgcccagccccatcgcgataagcagcccgaggacgatcagcgggaacgtcaccgatgcccgctcgccgacctgggcgctgatggagcggccggtcagaatggaggtgccgaaatcaccgtgcagcaacgcgccgatccagtcggcgtattgcgcgatcagcggccggtccagaccgagttgcgagcgcagcgcggcgacccgttccggcggggaattcagcccggccatcaccgaggccacgtcgccgggcagcacgcgcaatgccgcgaacacgacgatggagatgccgaacagcgccgccgcgaacagcagcagacggcgtatgacgaatcgcaagtggactccttccggtgagaacgccgcgcatcccgtcacagcccccgacctcgacggccggaatcgcctgtgtcgggatacgcggcgatttcagccgtcacttggtgtaggcgacgttgtacagcggcaacagggtctggttgaggttgatcgggaagccggtgacgcccttcgcgtacgcggtggtgacgcggtagttgaacagccagtcggcgggggcgtcttcggacaccttgcgtgcggcttcggcgagcagcttgtcgcggtcgtcgtcgttcgtggcggcgacggccttggcgtacagggcctggacctctttgttgtcgtagttgtagtagtaggtcgggtcggcccactggtagaagtcgtggctttcgttgtggtcaacgagcgagatgtcgtaattcctgttcgtatacacgtcctgcagccacgtggagaattcgaccacgttgaccttcaggtcgatgccgatcttcttgagctggctgcgcagctggtcgccgatctcggtgccgtatatgttcgcgtaggtcaggctcagctgcagcggcttcgattcggagtatcccgcctcggacatcagcgacttcgccttgtcaaggtcgtacgggtagatgccggtcaggtcctcgtagccggggtcgagggaggggatcgggccgccgagagcggtgtccgaaccgccgcgcgaggcgatgatctccttatggttgatggcgtagcgaatcgcctggcgcacgcgcttgtcggaggtcttcgctccggtgccgttgaacgcgagcacgaatttgtcggtatcgtcgccggccttgaccacgtaatggtcgctgtccttggtgaacggttcggccaggttctcgctgatcggcgcgagcacctgcacatcgccggacttgagcgcgttcacggccgcgttgtcgtcggtgaaataccgcacgacgaccgtgtcggtcttcgccttgttggcgccccagtagttggggttcgccttgagcgttatggacgagttggtgacgaacttctcgacggtgtacgggccggagccgatcgtctgggtcttcgcgtcgtatttcgcgtccttgtcgaacacgagtccgggacggccggtcagcacccacagcaggttcgcgtacggcgcgctgagcttgagttcgacggtgttcgggtcgcttgctttgacggagacgaagttgaccagcgaatcggcgtcatggtactgcttcgtgacgagctcgttgatggaccatgccacgtcgtcggcgtcgagcttgtctccgttcgagaacgtcatgccgtcgttgagatggaacgtgtatgtggtgccgtcgtcgctgacatcccatgtcttcgcgatggctggtacgacctgattgtgctcgtcgcgcgccacgagtccctcgtagacgttgccgatgagtacctggtcgatggccgatccggcggtgttgcggatgtcgaggttggtgggcgcgagtttcaacccgatggtgaccgtatcgttcgccttggcgcccgtcgtgtcgtttttgcgtcctgcgaacgccgcgatgcatcccgcgacgacggcgacgaccgcgatcacggcgacgatggcgacgatccaccatgtagcccgccggtgcccggcggcgttcttggcgcggctctccagctgcgcgtccatgctggccgcggcgctctcgttcgtcgcagcggtttcctgtgcgttcagatcttcgttgtcggttgcgccggcgtcgccgtgcgcaccatggttttcagtcatgattcctcttcatttgtattgtgatactgcggctggccgcccttgcgggtcgtccgccacaggacattgtagcgtcaggtcgaacctgactcgcgcggatgccgcgctggcgttctatcatgggtggaggcatccgttcatgatgcgcccacgcatcacgattcataaggggattcgcatgctcgtagcggtcgacatcggcaacaccaacatcgttctcggcttcctggacggcgacgacatcatcggcacctaccgaatcacgacgaaatcgaaccacacgtccgacgagtacggcctgatgatcacgcagttcctcgcgctgagcggtctgcgtccctctgatatcgatgacgtgatcatcgcgtccgtcgtgccgaaggtcatgcactcgttccgtgcaagcatcatcaagttcctgaacatcaatcccatggtggtcggccccggaatcaaaaccggcatcaacattcgcatcgacgacccgaagtcgctgggttcggactgcctcgccgactgcgtgggcgcgtattacacgtacggcggtccggtgctggtcgccgatttcggcaccgccacgacgttcaactacgtcaatgacgagggcgtgatcacctgcggcctgatcaccacgggcatccgcacggccgcggcggccttgtggggcgagacggcccagctgcccgaggtggaaatcaccaagccgaaatccattctcgccacaggcacgaagaccgcgatgcaggccggactctactacaacttcctcggcggcatcgaacgcacgatccggcagttccgcatggagctggacgagccgttcaccgtcgtggcgaccggcggcctgggccgcgtgttcaaggatgacacggagctgatcgacgtgtatgaccccgagctgatcttcaaaggcatggcgctgatccacagccgcaactcgcatcgctgaatcgcgcgggcaggcagcgggttcgcgtgaccggcttcggcatcggccacgccggcgcaggtcatttgatggtgaagccctgattgacgccgtactccttgaggtcgcgctgccatgcggcgatgccgctcatcagcgtgatcttcttgccgggtcggtccggcagtgtaatcggaccgccatcgtcattggtcagtcctgcgtccttgcgcgccttggcccggtcgtatgcctgcttggccgccgaccacgtgtatgcgtctgcggtggcgctgcggaagtcgctgcgcgcgtacacttcgaacggcaggtactggtatccgaccgacacggactccgctgcctcggacagcacctcgttgaaccgctgcccgccgaaatactccacctcgacgtgatgctcgctggtgacggtggtcttgttgaggaattcgccgctgttcaacgtcgcattgtcggccgggaaggcaccgccatcgacgcgggtcttgatgccggatttgttgtggcagacataatccacgaaacggaatgccgcttcaggcttgcgtgtggtgtgcagcacgcccagcgcggagccgccgttctcggcattggtgaccgtgccgtcctgagtcggcatgcgcgtgacgcgccacagtcccgatgtgcccggcacgtcggccagcagcagcgacggcatccaggctccggcgaacacggaggcgaccgacccgccgcccagcgcacgtttccaatcctcggaccagactttgagatgggtgttgaccagtccctcgtcgatcatgcgctgccagaattcggtgaacgtcctggttccggcgtcgcccttgagatcgacggtcacggtcttgccgtcggatgacgtatggaaaggccgaccgcccgcgagccatatcatcgcattgtagaagctggcgtcaccggcgtctgcggcgatgtacacgccgatgtttttcagctttttcgcggcctcgtaataatcatcccatgtggtgatcttggtcgcgtcgacaccggcctggcggaacgcgtcatcgttgtagaagaacgccataggcccggaatccatgggtagcgcgtacgtgcgctgcgcgagctgcaccgacgcccaggtgcctggggtgaagaacgagctgtagctgccgacacgaccggtgaggtccatcagctggccgctcaccgcgtactgcggcagggcatagtattcgagctgcaccacgtcgggcgtgccgtacccgtcctgtatagcgttgttgaggtggtcgtagccgctgatgttgttcagcttcacgcggacgtctggattagccttctcgaaatcggcgatcagcgtcgtcatgctgggttcccacgaccagacggtgatgacggtgcgcgtgtccggctgcccgcaggaggcgactgccagcgtcatcgcacagatcgtgagcaacgccgagatacgcaggcgcagccgccgcaaccgtgccgatatcgtcatgtcatctccttagcgtgctcgatgtatcgggaagaattcgctcatcgtagagtctacacgcgcgctgcaacaggtgaagatacgtgaaggcccctccctgatgaggggaggggccttcacacgaggaagggatgaccgaaggtcaccgtattccggtcattaccacgccagattgtttgactgcgaaggttacttgacggtgtagccctgatccttcgcgtagtccttcagagcctgttcccaaagcggcgacgccatcgctcagcttctggttgccggtgtaggacttgccaaggtagtcgccgaagataccgcgggccttgaccttcgggtcgccagtcaggttgatggtgaccgtctcgccttcggtggagaacggcgtcgcactggccagccaggtcatcgagtcgtagaagccggcgacaccagtgtcggacgtgatgtagtagttgtcgccaagggtgtgaatcttcttggcgtcctgatagaactcgtcccaggtcttgtcgccctggccggtgttcaccaggttgacattgatgccggtctccttttttgaagtccttggccacctgagtcagcgtaggccccaagcccacacggtgatttccttgacgtcgccttcctgcttcggagcggagctgctgcttgagttgccgcacgcagcgacgctgaccagcatcgccgcagcccggtaagcgccagcgccttctttcccataaggcgtatgtcgcgtgtcaccgcaaacatacgcctttcctaagcccttacagcccagtgtttccaacgattatcgcctgagcacgacaacacccgtcggatcgatggtggcccgcccgtcgtcgacatgcgcgagcgaagccgcgatggcctccccttcaacgtcgacggtcaccggttcatgggtgcggttgaacacgaactcgaagcggctcgccgccgcggcgtcggcgcgttcgacacgcagcacgcggccatcaccggcgaggtccgacagccccatggaacccagcatcgccggcaggctcttcgcaagcccctgacggcccagacggcatccgacatatacggtccgcccgtcgccatacccgttggccacgatggctggcacctcgttcatgccggtccagcgttccgccttataggaggccagtaccgtggacgtgtcggccgtggacgtgatcacgtcggcgaagtcatgcgccaccgtgccattgtctaggtcgaggtgatccaatgcgcccggcatgtcgttgcccatcggggcgaactcttcgacgcgcacgccgacgacgtcacgaatcgagcccgggtagccgccaagccagatgtggtcgttctcgtcacccaatccggtgtagtacgtcacgaacaacttgccgccgttcgccacgaactcccgaaccctacggctcgtctcttcggacagcatatacacgcacggcagcacggcaatctcgtaggaatcccaatcggaccgcaccggaaccacgtcggcggtgatgccgttgtcggcaagcgcgcggaaccaatccaacggctcggtccaatgatcgacctgctgggtcgggttcgcggtgtactcggtggcccactgggactcgtagtcgaacacgacggcgaccttggacttgaccgtcttggtgcccatcagaccctcgtcggacagacgtcccagatcggcgcccagctcgcacacatcacggaagatctgcgaatcctcgcccgcatgcggcaccatcgaggagtgccacttctccgcgccggccttggactgtcgccactggaaatagcagatggcatcggcgcccatggcgacctgcgcgagggagtcgcgcacgaccgagcccggctccgcacggtagttgatcggacgccaattcaccgcggaggtggaatgctccatctggaaccacggttccttgcgtgaaatgccgtccatcagcgacgcggcgtacgcaacctcgtcgaaatggtcctcgcccggcgtgaagtagtggtcgttggagacgaaatcgacctccgcaccccagtcgtcatagtcaagcatcgagccgccggcggacaccatgaaattggtggtcagcggcagacccggcgtgatggactccagcacgtcacgttcggcgatgtagagctccttgagcgcgtcggagctgaaccgcttgtagtcgagcagcttgcccgggttcatgaagttgccgtcaccgatgtagcgaggcgggatgatctcggagaaatcgttcatgtgctgggcccagaacgctgttccccaggcctcgttcaccgcgtcgatggtcttgtagcgcttcttgcaccacttctggaaggcgcgcatggcgtcgtccgagtagtcgaagcggttgtggcagccgtattcgttgctcacgtgccaggccaccacgtatgggttgcccttgtagtgctcggccatacgacggcacaggttcagcgcgtactcgcggaacacagggctcgtcgggcgccaatgctcacgggcgcccggccacacggtgtcgccgcgctcgtccttccacagcacctccggatgggcctgggtcagccacatcggcggggaggcggtggcggaggcgaggtctacggcgatgcccgccttgccgagcttatcgatggcacggtccagccagtcgaaatcgtacttgccttcctccggctcgatcttcgcccatgagaagatgccgactgatacaaggttgacgccggccttcttcatcagacggatatcatcgtcccagacctcctccggccattggtcgggattgtaatcaccgccataccagagacgggattcggcgcccttcagcggctgcggccaactgtgctttctgcgtttactcatgttccgctccattacttgttcattgtctgacgcccccggccgaaccgtcgcatcgacgaaaaatcaactgtgacatgcgagcgggctggtgccatatcgcgccagcccgcatcgcacacggtgagcgtccctccatatcatatacatgttccgtatggagagccagccgctaggcgcacgtcaagaccgtcagacgaacgtgacgcatgctgcaagcggacactggccctcccgcgagatcactccttgacggcgccggcggcgaggccggactgccagtacttctgcaggcacaggaacgcgatgaccagcgggatgatcgtgatcagcgagcccgtgatgaccaggttctggatggcttggccgcccgcagtggacgcttggtccttccactggttcagaccgatggtcagcgggaaccagtccgagtccttcaacatgatcagcggcagaaagcagtcgttccacgtggcaacgatcgtgaacagggccgccagcgcgatgcccggcaccgagatcgagccgatgatcaccgcggacacggccttgcggtccgggaagcggaacttcgtcaaagcgtagccgcccatgatcgccagcagggtcgcgccgcccgcgcccaccaccacgtagatcagcgtgttgaccagccagcgcgcgaagatgccgtcgtcataggtgaacaccgtcacgatgttgtcccacagcgcgaacgtcttgccaaagcccaggccgaacgcgcccgtgaagtccgattgggtcttcgtcgcgttgatgagcatggagacgaacgggaacaggcagcagaccgcgaagatcggcacgatgaacacgaacaccaacgcgaacggccacatgaacttccaaccacgccaatcccgcttgtgcttattcacacgagccaaaggcgacacactcaccgatgtcatacccctctccttcgaaggactcgaagcgaagcacaccgcacagaacttgccacaacgcaacagctcattgaacttgttccgcggaatgcaccctctataaatgtttgcgttaccataatatcaacattgttggaattgtccacttgagggtacggcaagtcatcaggaaatggtctatactgatggtaaccaaaacatagagatgccaagaaaaacaaagcaggaaccatggatcattcgcaacccgcttccatgcaggacgtggcgaaagccgccagcgtgtcgccccaaacggtctcacgagtcgccaacggaagcaatgccgtccggccggaaacacggcaacgtgtggaagccgccatggccaagctgggttaccggcccaactatgcggccagggcgcttaagcacggcaagttcaaggatgtcggcgtcgtgctgttcaacatgctcacctatggcaacgcgcgtatcctcggcggcatcgccgacgcggcgaacagcaatggttacgccatcacgatgcagtccttcggacgcaatcgggaacgcaccctgcatgccgccatcgagcgtatgaagcagcttcccgtggacggtgtcatcgccgtcatggaggagcacgtgacggacttctcggagttccgcccgcccaaggagctgccggtcgttatcatctccgaggatcccgcgaactactgccccaccatcgatgccgaccagtacggctgctcagccgccgtcgtggactatctgctcagcaaggggcacaagaccgtctaccacatcgccgggccgtcctcatcgcgagccgcggaaagccgcgcgcaggggtggcacgacacgctcgaccaactggggctgcgcatccctccgacctatatgggcgactgggaggcggacagcggatatcaggccggactcgcgctggctcacgaccccgattgcaccgcgatctatgcggccaacgaccagatggcgtatggcgcgatgctcggattgcaggccgccggcaaacgcgtgccggaagacgtcagcatcgtcggagtggacgattcgctgagcgggacgattccacggctgtcgctgaccaccatgcgcatgaaattcaacgacatcggacacgaggcgttcttcatgaccaagcgtctgtgcgagggccttcgagtgccttcgggcgtgaagaccgtggttcccgcggagctggtggaacgcgggtcggtgcgcgacctggaatcctagacgacgaatctcaagcgataatggcttcggtctcgccggtgtcgaacgggcgagaccgaggtcattatccgttcagcgtcggcgattcgtcagaggttcgccggctacataacgccttacgttctccaatgcgatacatccggtcgatgccttccgccgtgcgggtcgggtcacgacgcactcccagcgtgttcgcgcccatggccttgcatatgctggcgaaatgcgagccgatgtccccggtgccgaccaccagcaccgtggagccgcgcacgctcagcgcacggccgacatcgtgccatcgccgctccccttgttgacgggcacatatcgacattgtaggcgcacggaatattgccgcgacgccggtgacaaaaatgacgatgcgccggcccgtcttttctaggagacgggccggcgcatcagacggccggagaaccgatgttaccggttggacttacgcttggcttcaagcgtcacgaccgcacccgctaccatcgcaagtgcagcgaagacaacgcccattgtggaggcaccggtctttgcgatcacgtcgccgggcttcttgccgtcgccgggcttcttgccgtcgccgggcttttcaccttcaccaggcttctcaccttcaccgccgggggtcgtcggcttggtcttcagcgcgtcgatcgccgcagacagagccgcctcggcggcattgacatcatcctggctcaccttgtcatcgtcatagaccttgagcgctgcggcgagcttgtcatcaagcaccttgagcgactcgtccgtataggcggaacggtcgatcgcctgagccttggtgatcgtggcgtgcagcttgtccttgttgacttcggtcggaggcttctcgccacccttcttggtgaacgtcagctcatacgtgactggggacgtcacaccatccgggaagcggtatccgtcggcgggctcggcggtgactgtgacggtcacgttctcatcgcccacgttcacaacggaaccagcggccaacaccttgccgtcgaccttgtacacgactccctcgatgtcggggatggtgtatgtatcggcatcatcgtccactgtcggcttctgcggggtggcgaccttgtcctcctctacggccgtgggcagcaactcgacattcatttccgccgcggagccgaagttcgatccggaataatcggtcttgatgacaaacttgacgtaccgtccgttcttgggggtcagcttgatgcgctgcgtgtaggcgacgttcttcaacgtgcccgaggccacaggggctccaaaatcgttgggatcgtcggagacatacacctcgtaatccttggcggcaccgttattgttgccgtcgatacgggcgaggtagtcgaagtaggcgacgttctcacgcgatttgccgagatcgagagtcacccaatgcggggcggacgcggtggtcgggctgtactgggagtgccagctcgtcgacgagtcgccgtcgagcgccctcgccgcctctgcaccggagttctgcgacgactgggcgtgcacgctgatctcatcctgcgggacatacacgcgggaggccggtgcagtggcggaatcggccacgacccagccggcgtcgtccttgccgagtgccttcagcgcctgcttcagcgtcagcccggcggtcatgccgtcgaagctcgcggtggtggctttgtcgcttttgccgtatgtcgtcacggtgatgggctcgtccttggtgccgtagccgaagacggcgaagtccccggtcagctcggtgcccgccttgacgaagatcacggagcctggcgcgacggtcacatcgtgcagctgctcgatcgacgtcatgggcttgtccttcgtaaatccatctcccgcggtctgcgccgtcgggtcgatgtagtaggcgcgggcgccggtctgaatctcggattcggtgtggaacacctcaagacggctcagacgcaccggaccgcgggaggagttgaccaccagacggatggcatcgatgttctgggacgtgaagcgaaggtcgcgctgctgcccgaccgtcgtcatagtcgccagattcgtccatgttccattgactcgtccctgcagggtggcgctttcgatctgctggccggcattgcgcacgtcctcggagatcttcactgcatccacggcgacagcgctgcccagatcgatggtgtacgtcggcgtattgcccacggccttgtcggaggagagcttcgaaccgtcggtcagcttcggggccgctaccgcggtgccgttcgcggacgcggcgacggtcgcgctcttgcccagggcaagatcggtgccgtagcgtcgggcgagctcctcgcccagccccttaagtcccgcggcatccgcatcggcgagcttgccggtatcggacggtgggacgttcagcagatactgcgagttgcgtcccgtggactgctcgtagtacttcacgacttgagctacggacgccggcgattggttggcatggtagaaccatccgggccggttcttggcgtcgacttcggccggataccagtgcagctggttggcggcgccgctgcggatctcggacagcacgctcgacatggtgccaagcgtaccgtcggaggccatctggccaggcttgagcgacaccttgtctacgccgtcgttgtatgccgcctgcgggctccactcggtctgacgggcccagccgtcctcgttgcccacccatcgggcatcgtatgcggcgttggcctgaattgcctggggctgaagctggcggatcatcttgtagaacacgccatagtcgtaatgctcagtgcctgcggtgttgccttgggcaccgtcgaaccagacctcggagatgtcgccgtactcagtcagcagctcatagagctggttgagcatgtaggcgccgtactccgtggccttgtacttgaacgtgggcagtttgccggaagccaccttgtcggcgcggtcgtcgttctccaccagcgtggggatcgtgcgctcgacgcgtgcggagccgttgccccagacgcccttcttctccatgtaggaatcagccggcgaatagtagatgccgaccttcaggccgtacttcttcgccgaggcgacaatcttgcggaacaggtccttctcccccgtgcgcttggcgacggcggtgtttgcccagtcgtgctcggtgttgtaccgcgagtcgtacagctcgaagccgtcatggtgcttgaccgtcaccatgatcatcttgaagccaccgtcggcgaaggacttcgcccactggtcggtgtcgaggccggtcgggtcgatgcgggagggatcctcgttaccgtgaccccactcctggttgtagtacgtgttgatgccgtaatggaggaatccgatctgaccccagtcgatgtagtcggcctgcccttcggtcggacgcagcttggacagcttggtcttaagcgcggcctcgcactcggcgggcttcacgtcgaaggtattcgcctccttgatgcccgacgtgtcgcagctgacctgagagtagaccagcttgaattcgttggtggtaaagttcgcggaggttttggccaggcggatctcgctcagcgagccgacgaagccgcggctgagcgcggcggaatgcacttcgttgccgaagccgaccttgcccttgatgcccgaattcaggtaagccagaccggtgatgtccttggtctgggcgtcgccgccatccacgcgcatgacgagcttcgcgccggtgccggcctcattgggcacgtacgccaccgacacgacgtgctccgcacccgtggcggccgcggactcgatcttgtggtcggtccaattatcgccggacttggtggaggcgccgaacacaagcttgttcgactcgtagcgcaggaacaggttgccgcccgcgccgaacagggtctggttgtcgccggtctgcgtcggggtgaagcgcagctccgcgaccagcggcgtggtgatggcctcgttgtcaccgagggtgaagtccgtgggcgtgaaatcgaatccggccgtgccgccgcccagcgtgacggcggagttcgagatggacggattggccgagcgcgacaccagcgagcccagcatctgctcgccgctcgccgcggtatatgaggtgccgctgaacgtgccgttgaaatcgacatgcagcagctgggatgcgtcaagaatctcccacgggtcgtccgaatcggcgacacgcacgcggaacacgtcaccggcaagaccgcggctcgccgcgccggaagcggggttcacctcgtagccgatcccgaacttgttcccgacggaatcgctgacggccgcgagctcgccggccgcggaggtggcggtctcgccggccacgccatccaccttcaactgcaacgtcgaggcagcgccgtcggctcccggcagatatgtcagctggatgatgtgcttcacattgttggaaggcagcgtcacggacttcttgtagtcgttccatgtattgccggaagggttcgtggagaagccgtattcgaggttgctgccgttcgcccgcacgaagatgttgcccatggcggagaacaatgtggcgaggttgctgggcgtctgcttcgtacggtattccatttcggcgcggaatcccttgttcgccttcccgctcgcgctgaagctcgcggtcgaggtgaaggtcacgccgttggtgccgccagcgagggtgatgccgccgccgtcaagcttggtcggtatgctgccgtgcttggtcacggagcccttcgccacctcgtcgccacctgtggtgtaggtgtcttcagcgaacgtgccgccgaacgacacatcgaggtattccgccggattcgccgccaccgcgacgttcggcaatgccacgaacgcgagcgccgagaccgctatcaatgcggtgagtctgcgcagccacgaacgcgagcatcctcttgatgctgtgtgtagcatatttcaatcctctatgattttgaacattcttgtacttcttgccggaatctttgcctcggcggcacgactcgttccgccaagtgttcggattcccgcagacagtctatcagatcaggctgatttaaggtaccctatgcaagagttcgacatatgacggtgccggagagcatcggactctccggcaccggtcatgttcagcccctacggcgcttgatggtcagcagcaccgtcgcagcgctggcgagcgccatgaccgcgaccgatatcgcggtcacgttcgcgccggtcgccgacagcggaggcttgggtttgtcgttggtcttgccactgtcttccgctccgtcaccgggcttgttgccgggcttgtccgtatccgtgtcgccggttccgggcttggacgggtcatccgtaccgggagtgtcggggtccggttccgggtcgggatcgggacccggggccgggtcaggatcgggatcaggagtcgcatactcgtactcgaagtccgtcatccgcttgagcatctgcgcgacgtccttcgcggtggcgtccggattgtcgatcacggccttgacttccttcagcagcgcttcatttcaatccacgcaccccgtgaggggtgcgacgatatcgggcgcgtccggtgcacgcacaccatgatttcaatccacgcaccccgtgaggggtgcgactcgacaaactccagtccaacggagccgagcttaaatttcaatccacgcaccccgtgaggggtgcgacccgattgtgtcgctgcccttgccggaaatgtccatatttcaatccacgcaccccgtgaggggtgcgactaaagaccagatcatcaccgttgtggagggcaaatttcaatccacgcaccccgtgaggggtgcgactgacgtggtatccggcggcacgccggaaaaccgtatttcaatccacgcaccccgtgaggggtgcgactgtaggtttacgccgcgctgctgggcgagttgcaatttcaatccacgcaccccgtgaggggtgcgaccgaccgcgccgatacccagccactcggactcgccatttcaatccacgcaccccgtgaggggtgcgactgagcctgccggcgggcacggcacatgaccctgtatttcaatccacgcaccccgtgaggggtgcgactatacagttcgcgttgaacgcgtatgcgctttacagatttcaatccacgcaccccgtgaggggtgcgactacgtgatcgattcgcggcgggtgttacaatctgatttcaatccacgcaccccgtgaggggtgcgacgcggtatagacataagcgagtgccgcacgcgcgatttcaatccacgcaccccgtgaggggtgcgaccataagccaaaactataattacatgaccaacctcatttcaatccacgcaccccgtgaggggtgcgactctactggttagccggttacacaactaatgtttttatttcaatccacgcaccccgtgaggggtgcgacttcccggttagagttactacgcctgtgtttgagttatttcaatccacgcaccccgtgaggggtgcgacccgcaaaccggcgaaccctacccgcccatgcaatatttcaatccacgcaccccgtgaggggtgcgacgcgtgtacggccatacgctgtacaagggtagtggatttcaatccacgcaccccgtgaggggtgcgacctgatctcgtcgaatttttgtgtgatggtgcgatttcaatccacgcaccccgtgaggggtgcgacttaatctgcccaaaacgtgcaacgcatggtttctgatttcaatccacgcaccccgtgaggggtgcgacagtcccttccggtgcgcagccgcgcggccttggtatttcaatccacgcaccccgtgaggggtgcgacctctacgccggtgccgctgccgtcaacgttggtatttcaatccacgcaccccgtgaggggtgcgacacgacccatcgctattcttgctgcttgcgattctatttcaatccacgcaccccgtgaggggtgcgaccaacggcacgagttcgctcatcacctgccgatacgcatttcaatccacgcaccccgtgaggggtgcgacgcggcccgcagaatgatcttgccggaggcgtgcgtatttcaatccacgcaccccgtgaggggtgcgacgctgccctgctgttgcagcagatcgacgtaccgatttcaatccacgcaccccgtgaggggtgcgaccgttgcgagggagtgcgacgcgctcggcctcaaggatttcaatccacgcaccccgtgaggggtgcgacgcgtgggataccgaccaaaaagcgcaaaactgggtatttcaatccacgcaccccgtgaggggtgcgacgacgcatacaaccgcagtatgcaactcatagatatttcaatccacgcaccccgtgaggggtgcgacgccaccgacacggagtatgagaccgtgaccaacgatttcaatccacgcaccccgtgaggggtgcgacgccaccgacacggagtatgagaccgtgaccaacgatttcaatccacgcaccccgtgaggggtgcgacgcgcgtgctgcggccccgtcgtcgtctttttcgggatttcaatccacgcaccccgtgaggggtgcgactccgcggacagcacgaagcacgcgcctatgcccatttcaatccacgcaccccgtgaggggtgcgaccgccacgaaacgattcaatccgtaatcgtccacatttcaatccacgcaccccgtgaggggtgcgactagacatgttttcccgcctagccattgcaagccatttcaatccacgcaccccgtgaggggtgcgaccgcgtcccgtgcgataccctcggggatggagtcagatttcaatccacgcaccccgtgaggggtgcgactcgcccatcgcacgcaatccgcccatctccagataatttcaatccacgcaccccgtgaggggtgcgaccggccctcatgatgatcttgccgagggcgtgggtatttcaatccacgcaccccgtgaggggtgcgaccttggtgtagagccgtcatcgtcactaggccaatttcaatccacgcaccccgtgaggggtgcgacaggcaacgtaatagacggagccaagaaatttcttgatttcaatccacgcaccccgtgaggggtgcgactgcgcgtgtccgggcgtgtgctcgcgatcaaggaatttcaatccacgcaccccgtgaggggtgcgactgagagagattgatgccgtacacacgggggtcgtaatttcaatccacgcaccccgtgaggggtgcgacttcgtcatccattattttttcctttcatatatatatttcaatccacgcaccccgtgaggggtgcgacccggtcgggcaacccgtcgctgatctacccaggcatttcaatccacgcaccccgtgaggggtgcgacagtcgtaccgtgattatcgcatcgggatacatgcgatttcaatccacgcaccccgtgaggggtgcgaccgagatttcaacggccttgttgttgtcgatgaggcatttcaatccacgcaccccgtgaggggtgcgaccggcggagggctcggcggccagtaattccgccagatttcaatccacgcaccccgtgaggggtgcgaccgcattccgcgagcttgacaaggggggcaaggatatttcaatccacgcaccccgtgaggggtgcgactggtcaagggtataaaataaccgcacacccgccatatttcaatccacgcaccccgtgaggggtgcgacacagggtatgctcgcggtacagcgagcaccagagatttcaatccacgcaccccgtgaggggtgcgacggccgcatacgcggcggagcactcaaccccaccggatttcaatccacgcaccccgtgaggggtgcgaccgtcggagttcggacaatttttacgcaaatatgatatttcaatccacgcaccccgtgaggggtgcgactatagatcaggtaacataaacctgatttatcccggaatttcaatccacgcaccccgtgaggggtgcgaccttatctggcgatgatctgcgtcgcattgattgtgatttcaatccacgcaccccgtgaggggtgcgacaaagcgcgacacgccggggcaacaaaaaaaacagaatttcaatccacgcaccccgtgaggggtgcgacttccttgtcatcgtttccttcccttttaatattatttcaatccacgcaccccgtgaggggtgcgactactgcgaactctcatcatcccactcgcgaataatttcaatccacgcaccccgtgaggggtgcgaccggttcggggcggtgaactcgatatcccaacgagcatttcaatccacgcaccccgtgaggggtgcgaccgattttgctgcgaacgcgaaactcatactcgggatttcaatccacgcaccccgtgaggggtgcgacctcagcggtgcgaatattaccatcaataataatatttcaatccacgcaccccgtgaggggtgcgactgcaagaatggacttcatatctcaaaatatggatactccacccattccacggcatcaattgtaccgtacgattcacccgcattttccccgatatgcgaatccgctgaatcgatatgccagcagatcactcactcttgagttatcaaacgacaagaagaacacacaccgtcctcagaagccatgaaccgtggtgcgaacgacccagtgcttcatgagagctcaaggctcgcaccggccgatctccgcacgtcgtacaccgctccagtccgccgaatgccgcatgccaatgcggcgtcaaagcatcatcacgccatcgaccggtaaatgtcgctgccttccccgatattcaatcttcgaagaatacttcgccccaagattgtagtaccgcaggctgtcttgcgactcatccataatcttcgccagatcatgcttcagaatcaggtaatcggacggcgatacggagcactcgaaaacgctgttctgcacgcgttgaccgtatttcatgcaaatcttggccacgttccgcagccttcgtctgccttcgggcgtttccgtactgacatcgtaagccacgacaaccatcatcgttccatcttatcctgtctccttatcatgtcgaaaggaatcatccgcatcttttcacatcggcgagccgctccccgactctctgggaagctatttccacatgaatggcggataagcatccagatcaccgcgaatcgcacggttgagcagcaatgcctgtacatggggcaccagtccccacggcattttttcgttgaagaacggatgggtaatcgtctcctgttttcgcttctgccacgcggcaagcactgttttgcgcccgctatcggaaaggaacacgccgccgttctcacgcacttcgaactgggagggcttgaccgctcccgtgttgatgagcgtcagcacgaaacggtcggccagagctggccgaaattcctcaaccagatccaacgccagggaagcgcgccccggccgatcggtatgcagaaaccccacatacgggtcaagcccgactccttgcagagccgcgatgcaatcaccggtcagtatcgagtacacgaacgacatcaacgcattcgcacgatccaacggaggtctgcggctgcgctgctcgaagaagaacgcgtccttgttacgtagaatcaggtcatcgaaagcgaagaaatagtctttggcggccaatccctccactccacgcagcccgtctatggacgtgcaatcacgtatgcccagcaacgattgccgaagcttctcgctttgctcggcgattcgttgactgttgatgcgtagcgcgtggtcccgtttggttcgttcaagaacccaacgagagttgtagatcttcccgatgatgaacgaccgcgcgaacgacaaggcgacagtctcgtcgtccgcgaaacggaactgttcacgacgaagcagcacgttgcggttgttctcgccgagtatcgaacagtagtatcgtccatgaggggaaaagaacgacagtcctactccggattccgagcatctgcccatgagtgcgggcgacgcacctttgtaggagaagctcacgatgctctccagggagcgcaacgggatctgtccgagtgcgacatccccttgctggactatgacattgtcgttcttcagcgacagataggcgtcctcgctggtgacatacaaggtgttgagtagttgcttcatgtgcgattctcctgtccggccgcttctccgcgcatgacctcatcaatgaattgtttcgccgagcggcttcccgcaagtttcggcaggcaaatatcgcgtagcgagcacgctcggcagcttttcgaaggcttgacgttcggagtatgaccacgagcgaacaggtcgtgcatctcacctgacatagcaacgatctgatcgcgtaacgattcatcgagacgcacgcgctccctatgcttggtctgctggtagaacaacgcaccttccggaatcgagcaggccaacatctcttccaggcacatggcctccgcacacagttgaaggcgatccgcatccgtctgtttgggtgcgccatgcttgtattccacggggtagggcgaccaggtaccggctcgcccatgcaacggcacgccggcgtccgattgccggaactcgactacgtcacatgcaccggtgatgcccagccgtcgtgaaaacacacgcagatcacgcatgatcagcagatcgccccgtgcttccgacgcgccatagtcgtgagccctgtcatgttccagggagcccgcagtagtgagatagttgtcccgccactgctgctcgacatgaatcaacgcccactgacgtcggcaaaacgcgaaatgctgaaggccggaaagagccagccagtcatcttcaggatactctgattgtgcttgcatgcaaggcctctctccaacggttcatgcggtggaatcaccggcatacacaatccgaaggccggagattgccaaacgatggcatgatgtcattacgatgacgatctccggcctgcatggggaatcacaatgtgtgatcgaccatttcggtcaggctgacggattccggaatggcttcacgattcactcgaacctcgtaatcaccgaaatcgcggggcacatccacttcgtcacgcttatggacgtcaatgctgtcgaacagcttccacgagggggcatcgccaagcgcgctgctgtgcttgaatacgtacagcttgcgaaccgccatgttgccgcgcgccgcggagcgatcgaactcgaacatgttcagaatcgcttgccacagtacatcgaggtcttcatcgcagaaaccggtgacgttctgcgcgagcttggcggagatgtagccgttcatgcggtagaggccataggggatgatgaatttgttgcccatggtgttgtttttctcggcggcatccgcttccgtggtgacggcgatacgggtgatggatatctcctgaacgctgatcggatcgatggagcgggcgaacccgagctgcaccggaccccgcacctgaccgcacgacagattacctttgacgaatgtggtcatcaccgcgccgaaggtgcgaatgtcgaagaactggtcgcacatatagtcgcgcagacgtcgatccaattcgggatcggtcttcttcagagctttgatttccttggcgaaatccttgttttcaaggctggcgttgatatgttccgccttgagcgcctcaccgtccaaccgattgagcgtctgcctgttctggatatagattcgccaaggggcctgctcgcccatagccgtctgcacatagtcgcggatcttgcgcttgatgcagacatctgtcgtcaggccattaccggtttcgatgtcgactcggggcatgttgccggagtccgggtcgccgttgggattgccgtccttcacatcaaagaggatggtgaagtcataacggttctcgatgggtttacggtcagtcattgttctctccctgttcgttgttgttcttgttggttttgtcgaatcgtttctgattttcgaaataatatccgagttggaatgcgccgcgttcctccagggaaagacgggagggataacggtcccccactctcccggtcagctcgcccagggccttgtccagcttgactttcaaccccttcgacttccaggctttccgcatgtgcttcgccgcgagatctcccagaatcgggaagatgcgggccggagtcgtggatgcgctggtgaaatacttgtccttgatcgtggtattgatgcctggtatggcggccaactgaatctgctcgtagatggagaacatgcggccgagcacatacggcaggtagtcgctctcttcattgatgtccatccgtagcacctccttgaattgtgcattggttgttgcgcgtaggtaatacgctttgatgatcgccgccttgtccggcgagacatcatgttcggcattgatccgacgctccaccgcgttgatcagagtcatcggatacggcgtgccttcaagtatcgctttcatgacggcacccgccatttgcggcgacgctttcgcggttttgctttgtgtccgtatggtctgattcaacaaccgccatgtgggcaggaaggtcgtcgaatcgtagctggggcgtcggatggcggtatctcgataatgccgatcgatgttgcgcgcgaacgtcccgaacgtatcggtcaggtagaaccgaaccgaaagacgtgccgcattgggggacagcgcgagaatatggaattgttcatccgggctgaggtgaatttcctcgtagtcgtaaggtttcccctgcgccagcgcacgcgtggcatccacgaccactttttcactcagtccgccggattgccccatatactgatcccacacgtcacgatatgcgttatcgccacaattggcccatgatacgacggtatcacctccaatgcgttggacccgatcacggtcggcgagcagggtgttcaacgccgtcgtatattcataggcctcccgcttgctcatcggagcgttctcattctgctcggcgacatgcgagcagaatgccggggcgttgaatgatatcaatgacgcacctgatgattgggctcccgcgacacctttgatctttggatggaccttttccggaacgatgcgttcgccggaaaccaggcttgagaccagtgccgattcatcggcatcgtccacccgcccgtaataggcatcccaggcctcttgtatgcttggaagttctccaatgaatatcgtctgccctccatcgtcatattccagggcgaagttcatcgtcaccgatgatttccatgcctcatcccccataagacgttgggcggtctgccattgtggcgccttcgagaagaaggcgcatacggcggaggcggcacggtccttgacgccatcgagtatgcgtcgatgcaattcgccgcacgcttggaacgcctgcgccgcacgcttggcgttccctttggtgtcgcagccgagcaggtatgtgacgttgtcgcagaggaagttcgccacaatccctgatgaacggggaaaacgagccggcaccggaatgatattgacgggcttcttcccactgaagtcccccagcggtcgaactccgatcaaggtaccgtcatcgtcgacgaccaacccgtatggagcattgacgttgtcatacccataggccggagctctattctgagacaccaagacggcgtactcatcgcacagatcgctgatgatcatgacctgacctccacggattcgacgtccagcacgccatcatccagttcggcgcggaagaacaacggggtgggatgggccgggttgcgataatcaaagtcgtacaacatgtagcctaggtcccgatgcccatgttcgaaaccgacgggatcgccggattcctgccataactggaattccacggggaattccctcgcaccgaagtacgggtgatggaaacattgccccttggctgcacgtcgcatgaacatgctctggaatttctccgccgaatccgtagatgacattttcgcccggttgagttcgaaatgagcatctatcacatatcggacgtcacgcaggatggtggacgagcgttgttggatggattcggcagtgtatatggcaccgccatccccgcgtccttccgccatcgttcgtattttgccgatattgatgacgctatcgacctcattgcggcgtatgctgtcgaatcggatgggattgagcacgtgaatcctgtcgatccgccagcgcatgcccggatgccagaatatggcttccagtattccacgcgccgcagatggcgtcatgacgtcataggtgacgcgctccgttttgaattcgcttctcgagaaaagcgcgttctcgccccatacttccaagcgtattgacatcttccctcctttcatcgaggtgttttcgtcgttgacgactccaacataccacacaatttagatagagacaaataagaacactccaataaatacaaatcctaagctagtatcatggtgagggcgttcaacacgccgccgaagagagacaccgcgtattcactgattcctacggtcgctcccctcagggagcgtggattgaaatttattggtctccatctgggcggagcgaaacgctcgtgtgtccggccgcatccacgaccggacacacggattcctcacacgaaaatgccatcagcggtcgcaccatccagcttcaaccccagacgcgacgagtacaagcccatgtcacgcagaacaaagcaatcctcttcgtcgctcttccccgggccgaccgtcaataccgcccctaccgatttcaactcctcaagatgccgcggccatacattgaccgcatatctgccgagtttgcgaaacagcgtgcgatccatgtcgccacgctccaatcgctcgcacaggagcgcgccatcaccgggcagcgggatatacaccggtatggttggcgtatcgatgagcctgaaccgtttggcaatgtccgcaaaaggccagttcgcatcacgcccgtgcagcggcaggatacgcttgcgatcaagcgcatcattgccgacgttcgcgcgggcgacaccaccatttctcagacatagcacctccgcgaaatacgcgcgaaccgcctcatccgtattcaaatcagcatgacgatcggccaccgcccggaacgccgcaatgttctgccggaggaacggggcgcagccaccttccgtggaaaacacatggaccacactctccgacgcggggcgacgaccttcgcgattgcagcgtccggccgtctggatgacggaatccagtccggcctcttcacgatatgcgacgggaaagtcgacgtccacgccggcttcgatcagggaggtggaaaccacgcgacatgacgctccggcatccagtcgatcccggatttcagcgaacagtcgctgccgatccgccgcacactgcagcgtggtcaggcagaagctgccttcggcgtcatcgtccgccagccgatcatggagatactgggctttgctacgtgtgttcaccacacacagcacctgcttatggccacccagtcgctccgcaagcgcatccaatgcgatatcgccaagccgtttgatggtcacacgacgaaacgagtccctatcgtcacaagtgaacggcgaaatctcaggaacacgcacatggtcaccatcgaaggattcgtcaagcagtggctgcagctccggttgcgtggcggtgcacaacaccgccgtggagccgtatcgctccacaagctcggcaatcgcccgtacgcacggtctcagatacggcaccggcaacgtctgcgcctcgtcgaagacgataacggaatccgctatgttgtgcagcttacggcatcgcgaagttgcgttcgagtacaggctttcaaagaactgcaccgccgtggtgaccacgatcggcgcgttccagttctccgcagcaagcgcacgtctgagatccgttgcatccatgtcggactcgttcttgagctggtacggcgcctcggagtagtggggcaacacggcgtccgttccaaagatcgcctcgaactggcctaccgtctgatcgataatcgacgtatacggaatcacgtaaatgacgcgtcgcagattgttggtgcgcgcatgttcgagggcgaacgcgatcgaggaaatggttttgccgctgccggtgggggcggtgagcgtatataggccggtgccgtatgacggatctttgccgcgggcgaggcatcgctcaagcaactcacagcgtctgatatcaattggccgctttccgggtgcggcaagatatccatcggctgtgttctccatgatggtggccaggcgatcgatccgggaccggtcttcggcgtcacgctcgacggacaccgtcagcgacgcctcacgcagggcatcgaatgcgggcacccggccactcgccaggttctgcggaccaaggtgcttcttcaaagattcaaggatgtgatgttccgcacggtcaatacgattagaagtgaagaattcggcatcaagtcgatccgcatccaccaaagcggagaacagcatgcgtgtcaacatcatgtcggtgtacagcgaccatcgctcgggacgcttgcccgaggtcatcggcttcgcggatcgagtcccatgcaggaacgccgactgcggaatatccagttgcgcctctcccgcttgagccagagcgagtggattgcaatcccccgacctgcgtgccctgttcatgcggctcatgaacgttgaaccctccagctcgccgtaattgccgagatcaggcagccccgcgtgatgcccggccaccgccatcgccgccaacgggcatacatgccgcatcaacagcaacgcaccggccgtcgaatggtcaacgggtccgcaatgatcggggttgcggattcgccgctggaaagcatccgaatatttgcccagatcgtggaccagaccagccagcaatccgtcgtcaagatacccgaagcccttggcaaaccctccggcgaggcaaccggccatggccaggtgctccgcgcaggtctcatacccatgatcgctggttctcgcatagtacgtcgcacacattatcatcacctcgtcaatcgcccggtaacgcaagcataacgcggaacaacaaaagaggtcccgccgttgaacggcaggaccacttcatgcattccacgcgcccgtgcgtcacgcagcgggcgcggtcggctcaccacggcgtcacgccttggcgacctccacacccagctcggcgccttccttcaccgcgaaggaggtggccagcgtctcatgggcgatcagatcgcggaaccgctcgacatcggccacattggcggacggcacggtcagcaccagggcgatgcgatcggcgatgtccaggtcggcggccttgcgggcgtcctgcacggcgcgaatcacatcgcgggcgtagccctcggcctccaagtcggcggtcagcacggtatcgaggatcacgaaaccgccggtaggcagagcggccgacacggaagcgtcggcctcggcggcgttctcctcctccacgcggttgattaactcgtattcgccggcctccagcgcaacctcgccgttcggcgtctcgacgaccggagcaccggtcgcggcatcaacgtgccaggcaccggtcttggacgccttgatggcgaactggacctgcttgccgaggcgcgggccggcggcgcgggcgttgaccttcagctcgtgcacgatcttcagcccctgcgaaccggcatcctccatcgtgcagaactcaatatcctttatattaagctctgacttgagaatttcatcgtacgccttgacggcgtccacatcctcgaccacgacggtgagcttggcgagcggctggcgcacacggatctgggcggccttgcgcaacgacagagtgccggagacgatctcgcgcaccttctccatcgcgtccaccagtgccgggtcgtcgaccagcacacggccaagctcggtcgcctcaccggtcttctcgtccgcgacgtacggccaatcggccagatgcacggattcaccgccggtcaggccacgccacacggattcggactccatcggggcgagcggcgcgagaacgcgcatgaacacctcaagcacggtgtacagcgtgttgaacgcgttcgcgtcctccttccagaagcggtcacgggtgttgcggatgtaccagttggtgagcacgtcgatgaagtcacttgccgcatcgcacgcgtcagaaatcgcgaactcgtcgagcgacttctctacacgctctacgagcctgcgggtgcgggccagcaggtaacggtccatctcgggcagacccgccacctcgtccgcgcgcagctgacgggcgtcgaagccggccccgccattggccgcgttcgcatacagcgtgaagaagtagtaggagctccacaccggcagcatgacctggcgcacggtgtcgcggatgccctcagcggtaacaatgaggttgccgccgcgcaggattggcgacgacataaggaaccagcgcatggcgtcggaaccgtacttgtcgaacacgccgttcacgtccgggtagttgcgcaggtgcttcgacatcttctggccgtcggaaccgagcacgatgccgtggcagatcacgttcttgaacgccggacggtcgaacagcgcggtggccatcacgtgcagcaggtagaaccagccgcgagtctggccgatgtattcgacaatgtaatcggccgggaagtgctgctcgaacttctccttgttctcgaacgggtagtggaactgcgcgaacgacatcgaaccggattcgaaccagcagtcgagcacgtcgctgatacggtgcatgtggctcttgccggtcgggtcgtccgggttgacgcgcgtgaggttgtcgatccacggacggtgcatgttgacgttgccgtccttgtcgcgcgggtagtcgccgaagtcggccttgagctcctccaacgaaccgtacacgtcgacgcgcgggtacttcgggtcatcgctcacccacaccgggatcggcgaaccccagaagcggttgcgggagatcgaccagtcgcgcgcgttggcgagccacttaccgaactgaccatccttgacattctcaggaatccagttgatctgctggttgagctccaacaggcgcggcttgatcttcgtcaccgacacgaaccaggagctcacaggcttgtagatcagcggcgtggcgcaacgccagcaatgcgggtaggagtgcacatagctcttctcctggaacaggatcgcgcgatgctcggccgggatctcggccagcgggccgtctccgttgcgcaggttgcgcaggatcggcttgttcgcgtcgaacacgtacataccctcgtaatcggggcactgcgcggtgaagcggcagccggcgtcgagcacgtcagtgctcttgatgccgtgcgcgttcagcgtgttcatatcgtcctcaccatagggagcctggtgaaccaggccggtaccctcgacggtgtctacgtagtccgcggtaaagatttggtagccttcgggccccggcacgttgccctcagactcggctttgtcgccagcgaagtacgggaacaccggccagtaacgccaaccggccatctcggagcccttgagctcgcgcacgacctcgtaatcctcgccgagctccttctcgtacttggagagcaggggcttgccgaagtagaacttcttgccggcgtacttgccctgcgtcgggcgcacctcgacatagtcaatgtcagcgccgacgacgatcgcgaagttggtaggcacggtccacggcgtggtggtccagaagaccgcgtaggcgtcctcctcgtcgcgcagcttcacggccaccgacacggtggtgtcctgacgatcctgatacacgtcggcgtccatgcgcagctcgtgcgccgaaagcggcgtctgatccttcgggcagtacggcagcacgcggtagccctggtacgccaggcccttctcgtacagctgcttgaacgcccacatcaccgactccatgtacgggatgttcagcgtcttgtacccgtgctcgaagtcgacccagcgggcctgacgatgcacgtaatcctgccattcgtgcgtgtacttcaggacggaggcgcggcaggcgtcattgaacttgtcgatgcccatcttctcgatctggtcgaccgagtcgatgccgagctccttctgcgcctccagctcggcgggcagaccgtgcgtgtcccagccgaacacgcggttgaccttgcggcccttcatggtctggtagcgcgggatcacgtccttcgcgtaaccggtcagcaggtggccgtagtgcggcaggccgttcgcgaacggcgggccgtcgaagaacacgaactcgttctggctatggtcgccggaagggttgcgttcaacggacttgttgaaggtgtcgtccttgtcccaatacttcaggacggtttcctccatgttggggaaactcgggttcggcgcgacgctggcggtctcgccgccctcgttcgccttgggatacacgtgggaattggtggtttcgctcaccattgctctcctcgatgtcgcattgcactggtcctacgggagctggctatagcgaaccattcacgggaagaacagggattgagacggccgttcgccacaccggcggcatatatgcgccggcgatgtcctcgcggccggaacccttgttccacccggaacggccgtcatggccattcccgcctacgaggacgatgatcggcggcatgccctcaggctgccgaccgccaccgcggtaccacctcgcttgtcgctcgcatccggccatcctaagacggcgaaaactcgcgaccgcttgtgttcggctgtgacgggccgatcccgtcggttctactcagcttcgtgccgtcgacgttcgatcgaccgtcatgaagcttttcttccgaagactccccgctgataacggatcatcgccttgacttcggtgcatatcctagcacggtgtgtggccgacggaaccggagtgtccgcgaacgccgtcggctcgcggccaggcaatcatgcgaggcccgaaatccgaccatcatgccggatgtacgccgacgctcaatcgcgcacgatgctgccgacgatccccgagacaatggacatgatgagagagccgagcaccgcccaccagaacccgtgcaccaacacgccaacaccgaacagactgattgccaaccatgaggcgagccgcatgaacagccagttgatgaccagatacagcagcccgaacgtgagaatcgaaaacggcagcgctatcagctgcgtcaccggcttgatcgaggcgttgatcagcgccatgaacagcgcgaacactgcgattcccaaaatcggaggctgccccaccgcggtcatgccgggcagaagcaccaccatcaccgcggccgcaaccgtcagcaccagccatcgtatcagaaaatccttcatggcgtccatcttatgccatccaagccgtcaccgatcagttgcgatgtgccggttcggtgcattcatcatatgtcgggcacgatcatcgagaacgattgcacttaagggcacaatcgccgcctaaagacccagaccaccctcagtcggctccgccgacagctcccgccagcaggagccagcatgcaactccaatacgacgtcagggcggaaatcgtcgattacgttccgcggattcttcggctaccatgcaaacaggaggacgacgatgactacaaaggaaacggcgaccacgacgaagcaggcggccgcccggcaacgggcgttcgcgcaactggacgcgaccttccgctcaggagtcacccggccactgtgctggcgaaaggcgcaactcgacgcgatggcccgaatgctgaggcagaatgccaccgtcatcgcccgtgcggtacgcgccgacctgggcaaacccgccgcggagaccgcgctgatggaaatcgggctggtgctcgatgagattcgcttcatcaagccacgcctcggcaggtgggcggcgcggcatcccaagccgatgcattacctgctgcagcccgcagtcggctggacagtcgccgagccgaaaggcgtggcgctcatcatctcgccgtggaactatccggtgctgctcagtttcgagcctatggcggacgcgatcgccgcaggcaattgcgtgtgcatgaaaccatcggagctgtctccgcacaccagcggcgtgatggcggacctcatcgcacggtacatggacccgcaggcgttccgcgtggttcagggaggaccgcaggagacgacaaagctgctggagcagccgttcaatcacatcttctacaccggcggaggaaaagtcggttcgatagtcatggccgccgccgcgaagcatctcacaccggtcactttggagctcggaggcaagtcgccggtgttcgtcgaccgtaccgcgaacctcgacgtcgccgcgcggcgcattgcctggggacggttcatcaacgccgggcagacctgcgtggcacccgactatgtgctcgcaacgtccgatgtcatcgagccgctggccggaaagatcgccgaggccgtcacgcggttcttcggctcagacccgcaacattccgacagtttcggacgcatcatcaacgcccggcatttcgaccggctgactgcgctgctgcccgatccgaagagccccgccaccggacgcacggtatgcggtggcaataccagacgcgatgacctctacatcgcaccgaccgtgctattgggtgtcaaacccgatgcgctgatgatgcaggaggagatattcggcccgattctgcccattttggaagtcgccgacgcgaaggccgcagtggaattcatcaacgcccggccacgcccgctggcggcctacgcgttcacgggcagcaagagggtacggcggatgttcgagcgcgaagtcagttgcggagcgctgggattcaacctgccgcttggccatctgatctccagtcggctgccgttcggcggcgtgggagcttcgggcatgggctcatatcacggcaaggccgggttcctggagttcagtcatgtcaagaccgtggtcggcaagcccgcggtgccggatacgctttcgctggtgtatccgccgtatgacggcttgaagaagatactgatttcggcggtcagtcatacgccgagagtgcggtagcgggacacggcgcacctcccgctgacgggaggtgacgcgcagcgccagcgggtggtgaccaccccagtcggctcagccgacagcccccgtcagcggggacgttacagtgttccagtcagctccgccgacagcccttcgggccctgcaattatggacgggctaggcatgactgttccgctggctcattgtcgttcgctcttcgcctacaaacagcaccgctgtttgcttgacggctcagcccgtcaacgggggcataacgtaaaagcccctcgcgatgaggggctttatcgatgagtaggacttgttacttggcttcgttggtggtgagcatggccttggtgacctgttggtagagatcctcgtagccgccgggcgtggaggcgggcagcacgacggtcttggtgttgttcgactcggatagcgagcgcatcacatcaaggtactggttgaacagcacgacgttgttgacgtcgttgatgtccatgcccacggcctgcaggctcttgatctggtcgacgatgccgtttgcgatctcacgacggtagttggcctggccctcaccctggagtcgggtcttctcggcgtccgcagcggcctgcgtctcgatctggatgcgctgcgcctcggcacgctggcgggtggcctccttctcacgctgcgcggcgttgatggagtccatcgcgctcttgacctgcgggctcgggtcaatggcggtgatcagcgtcttgacgacggtgaagccgaagcgcgccatctcggcgccgaccgtcttctgcacgtcgaaggcgacgtcgtccttgcgggcgaaggcgtcatcgaggctgagcgccgggatcgcggaacgcagcgcgtcctccatgtagctcctgagctgtccggctggatcgcgcagctcatagtatgcggtggcgacgttctcaggattgacacggaactgcgtcgaagcgacgaccgtgacgaacacgttgtcgagcgtcttggtttccagctgcacgttcagctgggagactcgcatgttcgtcttcgtcgagatgcggtcgacgaacgggatcttggcgtggatgccggcgaactggaccttattgtatttgccgaaccgttcgatgatgtatgcctgctgttgcggcacgatgaaaatcgaggcgcacagcacggcgaggacgatgacgacgatgacgcccgatatgatcagagcacctgtcattcccaccagaacacccatcattcctccttgcctggtgttgccgcaccctacttcgggcgcgatgtctattccatcctatccgaaaacgacgggctttcagtgaaagctcacatagaattcaagagttgttcgccgtgtggcccttcttcgtctcaccgtacggaacggcggcatgcccacgtctactccccgtatgcgccggctatggcccggtcaaggtcggccatcaggtctcccgcgtcctcaagaccgatggacagacgaatcaaatcgtcgctcacaccggcggccttgcgatacgattccggcacctcgcggtgagtgatgttcgcggggtcgacgatcagcgaccttgcatcgccgatatttggcacgtatgagaacagcttcacgccgtcgaggatgcgacgcacgcggtccgcgccgccttccaccttgaacgagaggatctggccgacgcctcgggggaagtatttcccggcgagcgcatgatacggcgagtccggcaaccctgaataattcaccgacacgacatgcggcgtgtgttcgaggtgcccggcgatggccgtcgccgtttcgacctggcgggcgacccgctgcggcagcgtctccagtccgatcagctgcaggtatgcgttgaacgggctttgcacggcaccgaacgtgcgcaggtatttgacgcggatgcgcctgatgaacgcttcggagccaaacgccccggagaagctgcgccggttgccgtcgatgtcggcgatgacctgctcaggccgcgtgaattgcaggaaacggccgttcgcccagtcgaaccgtccggcgtcgacgatcacgccgccgatggcgttgccatgcccggtgatgcccttggtggtcgaatgcacaacgatgtcggcgccgaattcgatcgggcgcagcaggtacggcgtcggcacggtgttgtcgagaatcagcgccagcccgtgccggtgcgccagatcggccagcggacgaatatcggtgatggcggtgttcgggttggcgaccgtctcggcgaagatggcacgggtcgcgggaccgatcagagactcgatctcatgcaggtcgttgatgtccttgacgaaatcagcgtggatgccgaactgcggcaggaagtcgccgagcgcatcgactgacgccccatacaggttcgtcggcgcgatgatgcggccaccgccctcccccgcgcacatcagcgcgtatgacaccgcggccatgcccgacgacaccgccaccgcgctgacgccaccctccagggcggcgagccggcgttcgagcgcatcgacggtcggattggcgactctggaatactcgaacccggatatctcaccggcggccagatcacggccacgagcggcgttctccaaatcgaaggcggcggaggcgtagatgggtacgctgaccgcattgtcgttgcggttcgcattatacccgccatgaaccgcaagcgtgctgaaatcagccattcccaaatccctttcatccgcatgaccgccaaaacaacgaacaccgaccgccatatttcttcaagacacgacagtgcgggcgtcattgccatgaacgtcgacgcccgcacggcccgcaccgcatgataggcacggtacgcgaccctatgcggccacttccgtcgtcagccggtcgagcacctgaccgcttacgccgtcgatgtccagcgcctcgaacgccttgtcgaagccctgccccagatcctcgatcaggtcggacacgtcctcgatgcccaccgacagacgcaccagctcgtcggtgatgcccaccttgagacgctcctcgcgaggcagctcgaaatgcgtcatgcggcatggcagctcggcgaggctttccaccgcgcccagactgacggcgagatggaacacgtgcaggttgtcgagcacgatggacgggtcgacccccggcaccacttcgaaggacagcacgccgccgaaccccttgagtccattctcggcgagcagacggttgcggtcgccatacacgcccgggtaatgcacggcccgaacgagcggatgcgccagcaggtattccgccacggcctgtgcgttgcgctgctgacactccatgcgcagcgccaacgtctggatgccacggcgcacgtcgttgcattcggtcggggcgagcacgccgccgaaccggttctgcgcgaagtagatgccattgccaacctcatcgtccaacaccaccacaaggccggcgttcacctcggaatggcctgccaggtatttggtggccgaatggatgacgatatccgcgcccaaatcgagcggctgctgcaggtacggggtgacgaacgtgttgtcgacgatggacagcgcgccgtatcggtgcgcgatggccgagatgcggttgacgttgctgatctgcagcagcgggttggtcagcgtctcgaaatatacggcgctggccgcgcggccgcctctgtcgcgcccgctgatcgcggcgtcgagcgcctcgtagtcggcggtgtcgacgctgtcgaactccagcccgcgctcggcgaagtactcgttgaacagcgaatacgtgccgccgtagatgttcttgccgaccacgatgcggtccccggatttgaagatggacagcaccgcgtgaatcgcggcgagtccggacgcgaacgcgaagccgcgagtcccgtgctccagctgggcgatctgcttttccagaaagtcgcgggtcgggttgccgctgcgcgcataatcccagcggggcatggcgttgaccgattcgacagcgtatgtggatgagttgtagatgggcgggttgacggctccggtgttgttgtcgttgaccggcaatccgtggaccagctgagtgttgaacctcgtcatgagcaccccctgcggttttttcttggcgggtttcccgatgaaccccgcgtgacccttatgaaggtagtcagcggccggcggcctcgcaacccggacggcatacacattatttataggatgctcaaaacccttgcaaacactggattttcacgacttgcacagcatctttgacgaccggcaagagccacttgcgacacgcacggaatattctggcggcaaccaaggcgcgactaagtgcgacatggcttcgcgcagaaaccgacgctacgacccatcggccatcgtgatgttcgtcacatccgggccctgtagggcatttggtctcaccccggcagcggaatcgggcgatatgctggagtgacgccggcgggatccacgcgccggagggacccaagcaaaggagctcgcccatgaccaccgtagccatcgtcggatgcactcacgcgggaacgttcgccgccacatccatcctcaagcagcatcccgactggacggtccacgtattcgaacgcaacgactcgctgtcgttcctttcctgcggcatcgcgctgtgggtcggcgaccacgtgtccgacccgaagcgcatgttctattcgtcgccgaaggccctcgccgaagccggtgccacgatgcacatgcgccacgacgtgctcgatgtggatgtcgccggcaaggtgttgcgcgcccgtgacatgaacaccggggaagtcggcgaataccgatacgacaaactggtgatcaccaccggttccgcgcccgtggtgccgccgatcgacgggctggacgaggcgctcgaatcgggacgcgtgctgctgtgcaagaactgggaccatgcgatggcgatcaaggagcgcgcgggcagcgcgaaatcggccgtcgtgatcggcgcggggtacatcggcgcggagatcgccgagcagttcagcgaaatcggcgtgaagaccacgctggtggatgcgctggaccgcgtgctggcgaacaatttcgacgcgaccatcaccgatgacgtggagcaggcgttcgacgagcatggcgtgaccctggcgctcggccagaaggtgacggcgttccggccggcggccggcagcgacgggatcgagggctccggcgtgaccgtggtcaccgagaagggcgagtacacggccgatgtggcgatcctgggcgccggattccgcccgaacaccgcgttgttcgcggatcagctgcgtatgctgaagaacggggcgatcgtcatcgacgactacatgcgcgcctcattgccggacaacacggtgctcgacgacgtattcgcggcgggcgacagcgccacggtccgatacaacccgaccggcgcggacgattacatcccgctcgccaccaatgcggtgcggcaggggctgctcatcggcgagaacatcgtcgccgcgacgaagcggtatcccggcacgcaggccaccagcgcagtgcagttgtacgatctggcgatgtccgccacgggactcaccgccggcggcgcgaaacgccgaggcatcgccgcgaaatcgacgacgatcacgcaggattaccgccccgatttcatgctcaccaccacgccggtgacgaccacgctggtgtggagcccggtcacccggcgcatcctgggtgcgcagttcctgtcgaagcatgacatctcgcaggcggcgaacgtcgtgtccgtggccattcaggcggggttcacgatcgatcagctcgccggcgccgacctgttcttccagccgaacttcagccaaccgatcaatttcgtcggagccgtggccattcaggcagtggccgaaagctgaccccaatcgttgactcgcgctcaacgcggatacgaaagccccgatcattgggaaacggccattccggttctcgtatccgcggctaatgcgagcgcacgattcgcatcagccgcgtgacctgttcggcggtgcgggccacgttcgcacgggcgtcgcgcagcagctcatcgaggctcgcggcacccggcgcggcaccgaagaccgcatcgatgccgcgcccgtgcagacactcgatgccgtcgccgacgtggccggcgatagcaatcaccggtttgccgtgccgcttcgccacggaggcgaccccgaccggcgtcttgccgaacatggtctgcgcgtcaatcgaaccttcgccggtgaacacgatgtccgcccattgcgcggcggcatccagcccggactgctcgatcaccaagtcgatacccgggcgaaaatcggcgtgcagcacggcgagcagcgccatgccgatgccgcccgccgccccggctccgggatgatcggcgatgggcgtgcgggtacggtagtcaggacgggaacggtggccaggagacgatgattcagccacggccgcttcgacttttccgccatcgccattccgttcggcgggcacctgttcagcgagcgcacgttcgatgaccgacgagacgtgccgcagggcgccgtccaacagcgtcacgtcttcgcgactcgcgcccttctgcgggccgaacaccgcgctggcgccctcggggccggtcagcggattggtcacatcgcaggcggcgatgacatgcacgtcgccaagccgtctgtccaggccgcttaggtcaacgcgctccacttcggcgagcgccgccccgcccggccgcacgtcacgcccgtcatggtcaagcagccgcacccccaacgcctgcaggagaccgcagcccgcgtcgttggtggcgctgccgccgagcccgacgatgatcgtctcggcgccggcgtcgagcgcggcccggatcagttcgcccgtgccgtatgacgtcgtggccttcgggtcgcgttcggatgggcgcagcagcgccagtccgctggcggcggcggtctccacgaccgcggtgcggccgtcgccgagcagcgcgaacccggcctgcaccgggcgtccgaggggatcgtgcgcgccggccgtcagcatcgtgccgccggtggcgtcggccagcgcccgcgcggttccctctcccccgtcagccatgggcaggcatcgtatttcggcgtcggggtcaccgcggcggatgccttcggccatggcccgtgccgcctcggcggcggtcaggctctccttgaaggaatcaggcgcacataggtatcgcatcgccggatcacgcctgctattcggtgcgcagcgcggtggccgggtcctgcttggcggccttgcgcgacggaatcaggccgccgataagggtgagcaccatgctgagcaccaccaggatcaccgctccggccaccggcagcgcggcgttcacgtcgttggtgccgatgaaatggtgcagcacctggttgcccggtatgagcagcagcagcgtcacgcctatgccgatcaggccggcgcacaggccgatgagtccggtctccgcgttgaacacctgcgacacattgcgcttcgaggcgcccatcgcgcgcaggatgccgatctccttggtgcgttccagcaccgagatgtacgtgatgatgccgatcatgatcgacgacaccaccagcgacacggacacgaacgcgatcagcacataggagatcacgttgatgatcgtcgtcaccgagctcatcatcaggccgatgtaatcggtgtagacgatcttgtcggccttgggcacggtcttgttgtagtcggtgatggccttggacacgtggtccttgtcctcgaagctgtcggtgtagatgttgatcgtcgagggcgcatcccggctcaccacgccgaacgcggcgaggttgtcgtcatacgtgccggtcgagacgtactggtcgtagatcttgaccagcacgtcctgcgaggcggtggcgatgtactggtcgaagctgtcggcgagccgctgctcgctcatcgccgccgtctgctgcccgcccgcggctgactgcccggcctgcccgggctgcccgggctgagccgactgcgctgactgcgactgcatcacggccttggccatgttcgccttgtcgctcacgccgagcgaggccacataggtcttggcatcagcggccttcgccgcgtcgtccaacggcgagaacgccaggccgttgagcacgtcgcgggtcttgtccttctcctggtcggtgacgatggcgctggagttcgcatggtcgatcagctcgtcggtcagtgcgcgggtgtagccgattcccgtggccaacggcgtggcggaggcgtccttgatcggcttgaccacgcccacgatcttcagctgctccgccgagtcgaagcgctctgcgatggcgtccgcgtcgtcgccgatgtacgtgtagtcgccgtccgcgtccttcacgtactggtctgcggcgggtatcatggccagcttctgccccatcgccgtcgcgtagtcgatcttgccggtgggtgtcttgaccgtctcgccgtcgttgagcttgttcatcatgtcggtgtagtcgctggccttgagcaggcccagctcatacagcgtggtgagcggtaccttgttgtcgtcgtcaagcacgagcacgacctggtccttgccggtcggccatgcgcccttgaccacgcggtagttgtcggtgatgaccttgctgatgagctgatcgtccttcgcccccggcatgatttcatggaacgagttgggcgacgcgctcgtgtcggtcttgccggtcagcaccgtcatctgcatgctcgtcatgtcggacatgctcgacgactggcccatcgagctcatccgcgcagcgttcgatgtcgaatcggacttggcaccgatggtgacgccgttcgcggtgaccagcgtgccgtcgggatcgtggctgaacacggagaacttcacgtcgtacgtgtattggatgccggtttcgccgacatattggcgaacctcgctgttggggtcgtccagatacttcttgaaatcggcgaggttgttcttcgtgatgctgctcgtcaggctggaggtctgcttgatgctgcggtcgtccgggtagatgccgtcgttcttcgccgatctgcctccggtctccttgccgcccgcctgggcgcccatgatgctggtcatgtcgaaggtctgcgagtcgatggtgatcggataggcggtcatcgtgtcgcgctggatgctgtcgatgtacgcgttaacgccggtggaaaccgacaggatcagggcgatgccgatgatgccgatagacccggcaaacgaggtgagcagcgtacggcccttcttggtcctcagattgttgaagctcagcgcgatggacgtggcgagcgacatcgaggccttgcccagcctcttgtgtacgggcgcctcggactcgccctcctcgacctcgtacgggtcggaatcgctgcggatcacgccgtcgcgcagctggacggttctggtggcgtactgctcggcgagctcgggattatgtgtgaccatgaccaccagacggtccttcgccacctccttgagcaggttcatgatctgcacggacgtgtcggagtcgagcgctccggtcggctcgtcggccagcacgatgtccgggtcgttgaccagggcgcgggcgatggcgacgcgctgcatctgcccaccggacagctggttcggcttcttgttgatgtggtcgcccagcccgacctgttcgagggccttgcgggcacgctcccgccgttcggtacgggatacgccggagatcgtcagcgcgagctccacgttcgacagaatcgtctggtgcggaatcaggttgtagctttggaacacgaagccgatcgtgtggttgcggtacgaattccagtcacggtccttgtaccgtttggtggagaccccgttgatgatcaggtcgccgctgtcgtaccggtccaggccgccgatgatgttgagcagcgtggtcttgccggaacccgacgggcccaatatcgccacgaattcgctgtcgcgcaggttcaggctgacgtcatccaacgccttctgcacgaaatcgccggtcttgtattgcttggaaatcgacttgatctgcagcacgatgctccccttattacccatgggtggttcgtcgtatgtctccatgatttgcgatatgacaccactgtatccgacccgttcccccagcgcctcgtgattcaccgcaagcatggggaataaaaccgacaacaaacgactttgcgtcgctttggcatgacggaaccgtgacggccctcgcgcgtcaagtgtgtgcatcaagcatgctttgcgtttttctagcgcccccctcagcagttttcccatacagtcgaaaccatgacaggactcactacatctgaagtcgaagaacgccgcgcgcgaggcgagggcgaaaccggggcgcgaagcgtcaccaaatcgacaggcgcgatactgcgcgagaacatctgcacgctgttcaacgcactgaacttcgctatagcgatactgctgttcgcggtcggcgcgtactccaacatgctgttcatcgcgatcatcatcctcaacatcgtcatcggcatcgtgcaggaattcaaggcgaagaaactcgtcgacgagctgacgatcctcaaccagccgcacgcggtggtgctgcgcgacggcaaggagacgaccatcgaggccggcgacatcgtcaaggacgatgtcatggtgctggattccggcaagcagatctgcaacgacgccgtggtcatcgacggccgtctggaagtcaacgaatcgctgctgaccggcgaaagcgactccatcgacaagaccgccggcagcgagctgtattccggcagctcggtgatttccggccgcgcgtacgcccgtgtgacgcacgtcggcgacgagaactacacgaattcgctgatcaacgaggtgcgccaggagaagcgcgtgcactccgagctgctggattcgatgcgcaaggtcacccggttcaccagcttcctgatcatcccgctgggcgtgctgctgttcgtcgaggcgatgttcctgcggcactccggcacgtacgacgccgtggtgtcgtccgccgcggcgctgctcggcatgctgccgaagggactggtgctgctgatctccgtgtcgctggccaccggcgtgatccgcctcgcgaaggccaagatcctcgtgcagaacatctattcgctggagacgctggcgcatgtggacgtgctgtgcctcgacaagaccggcacgctgacggacggcaacatgagcgtggaccggatcgtgccgctcggcgagcgcggtgccgccgaggattccgacgcgctgctgcgcgcctacctggacgccagcgaggacaacaacgtgaccatcgcggcgctgcgcgcccatttcggtgccgacggctccaccgccgatgccgggcagcccgcggcacccgccggcgacggccgtttcgccgcgcaggccatcatcccgttctcgtcgaagcgcaaatggggcgccatcacgatgcgcgcaacggctggtgcggcagacgcgcctcgccacacgcaggagggcgagtcggccgcggcggcgaccggaaccgtgttcctgggcgccccggagcgcatccttggcgtgaacctgcccgatgaggcggccgcgctgatgggtcagggactgcgtctgatcgccgtcggatacctgcccggcgcgtggacggacgaggagcgtctgccggatgcgctgcagccgatgttcctgatcgcgctgcgcgacaacatccgcccgcgggccaaggagacgctggcgtacttccgcgaccagggcgtcgacgtgaaggtcatctccggcgaccatcccgacaccgtcgccgccgtcgcccggcaggccggcctggagcgttggcgtgacgtcatcgacatgacctcggtgccggcggacgccccggattccacgttcgacgacgtcgccggccgatacacggtgttctctcgcgtcacccccaagcagaagcgccagctggtgcaggcgatgcagcgggccgggcatcaggtcgcgatgaccggcgacggcgtgaatgacctgctcgccctgcgcgaggccgactgctcgatcgccatcgcctccgggtcggacgccgcgcgccagatctcgcaggtcgtgctgctcgactccgatttcacctacctgccgcaggtggtgctggagggccgcaaggtcgtcaacaacgtgacccgcacggccgccgtgttcttcatcaagacgatctactcggtgctggtgtcgttcttctgcctggctttgaacgtcccgttcccgttcattccgatccagatcacgcttgtcgacgcctgcatcgaagcgtggccgtcgttcctgacgatattcgaatcggacacgcgacgcatccgcggccggttcctgcccactgcgctcggcaaggcggcgccgttcgcgatcgccgtcaccggcatgatcatcgcattcagcctcatcgctccgttcggcgagacgcagaaccgcacggtcatgttcgcgctgctgatcgccgcgtcgatggtcgccgtgatcaagagctgcgtgccgttcacgaagatccgcgtgttcgtctgcgtgacgatggtgctgggcgccccgttcgcgctgctcatcctgccgcacctgttcgaggtggtcgcgatgaccggcccgatgtgggcatggttcgcggtggcgttcgtggtgatgatggccgtcaccgccgcgatcatcgcggcgcagcgggcatggctgcggtcacggcgctgaccggcgagcgattccccgtgataccggcgtggcttggcatcagatgcgtctggactttcggggggagcggcagcagtcgtgttgtccacagggacgatagactgtatgcggtttcattgctgttccgtgaatccccgcaggggctgtgtcgccgaacggccgcagcggcggtctggcagcggcagccgagatcggccggatcccgtaataatgcagcttgcgcagcacgtgtgcataggcctcgtccagcgtcctgcgctgctcctcgatggcggcgccggtcctcaagcagcgcgacgatgtcgtcgatatgctccggctcgtcggcctcgaacgcgaagaaccgcttgaggtcctcgatggacatgtcggcgacctcgcggattgtgcatcgttccatgctcgacatcgtagccgcgaggatgacacgccggcgcccttgcgctcaagccaacttgaagcgtgacaatggagacatcggaccgatcgacgacacctggaggcacccatgttcgaacccaccggcacctacgcgcccgccacgacgcgctacgacaccatgctgtacaagcgctgcggcgccagcggcctgaagctcccggccatatcgctgggcttctggcacaacttcggcgacatcacgccctacgaccagatgaaggccctggtgctcaccgcattcgaccacggcatcacgcacttcgacctggccaacaactacggccccgaacccggcgccgcggagaagaacgcgggacggctgatccggcaatacctcgccgcccaccgcgacgaactggtcatcagcaccaaggccggctacgagatgtggtcgggcccgtacggcgattggggcagccgcaaatacctgctcgcctcactcgaccagagcctggaacgcctgggactcgactacgtcgacatcttctaccatcaccgtccggaccccgagacccctctggaggaaacgatgggcgcgctcgcccaggccgtcgccagcggcaaggcgctctatgtgggcctgtcgaactacgacgggccacagctggagcgggcggcgacgatcctcgatgaactgcacgtgccgttcatcatcaaccagaacaaatacaacatcttcgaccgcaccgtcgagcgcaacgggctcaaggacaccgccaagcacctgggcaagggtctcatcacgttctgcccgctcgcgcagggtctgctgaccgaccggtatctcaacggcatccccgcggattcgcgcgtggcgcacgatccgcgcttcctgcacgccgacgacgtgacgcgcgtccacggccagatcatggccctgaacgagatcgccaagcagcgcgggcagacgctcgccgagatgtcgctcgcctggctgctgcacgacgacgccgtgaccagcgtgctcgccggcgcatccaagccgcagcagatcatcgacaacatcggggcgctgaagaacacggacttcagcgacgaggagctgaaagccatcgacgagatctccatgcagtgacgaataccgctggaagtcgcatccggaaacggctcccagggtaccggaaggaaacgtaccggcatatattcatgccaatcacagcacagcttccaggatggtggagtgatatggaggttgtcggcaagagccggcgaggtcactcaaggtaaccccacaattgtccccctctctcttctccttctcacccggcccttttgggccgggtttccttttcttcggagcctgcgacaccggaaagccgacgacggcgaatcgtatcgcaatggtgatgtacagtagtgagttcgccacgaccattacgaggcggcttcatgccgccgggaggagacaccgatgctgcccgacgggacactgcccgacgattatgtcgtactggatctggaaaccaccggtgtcagctggtatcgggacaccatcatcgagttcggagcggtgaaggtcgtcgaccgcaagcccgtcgacacctatcagcagttggtcaatccgatgcgcaacctcaatccgttcatcacgcagctgaccggcatcacgccggacatgctcgaaccggcaccgacgctggacaccgtgctgcccgacttcctgcgctggtgcggcgacgacgcgatgatcgggcacaacatcatgcggttcgacatcaagttcatcgatctggcggcgcagcgcatcctgcaccatgcggtgccgaaccgcatcatcgatacgttgcagatgagccggagcatgtacccgcagtacaaccgacaccggctggtcgacctgatccagcgtttcgacatcgccgacgtcgaggagcaccgcgcgctgtcggacgccgagcagacacagatgtgcttcgaatacatgcgcgacgagcagcgtcgcagagactgctgagagcggagcgagctgactgatggcattgggcgttggcgcgcggtctctgacgccgcccgccaacgtccaatgccatcggcgcagttttctgcttccgtcagcgttgattcagggggatgtaggcgcgctccacctcgccggtgtacacctgacgcggacgaccgatcttcgtgttcgggtcggcgagcatctcgcggtactgggcgatccatccggggatgcggccaagcgcgaacagcgtggtgaacatcgccggatcgaaaccgatcgcgcggtatatcaggccggtgtagaagtcgacattcggatacaaatgacgtgacacgaaatactcgtcgttgagcgcgatgtcctcaagctcgaccgcgacgtcgaacagggcgcgctcgtcggcgggaagcttgcgggtgtcctcacgcgcgatgatcttctccagatacaggcgcgcgatcgcggcacgcggatcatacgacttgtacacgcgatgcccgaggcccgagatgcgatgcccctcggccttcgcgtcctccacgaactggcggacggacttgccggagtcgcggatcgccttcaactgacgcaacacggcctcgttcgcgccgccatgcaacggcccggacagcgcgttgatgccggcggagatcgccgcatacaggttcgcgtgggcggagccggcgatgcggaccaccgacgtggagcaattctgctcatggtcggcatggatgatgagcagacggccgagcgcgtgcacgtacagcgggtcggaatcgaaccgctcgtatggcacggcgaagcacatgcgcaggaaatcgtcgacgtagccgcgggcgaggtccgggtagagcatcggctcatcgcggcggcgccggaaaatgtagctgaccaccgtgcgcgccttcgccatgatgatcttcgcggcctcatccagctggtcggagtcggtgatgtcggtggtgtcggggtagaacgccgcaagcgcgttcaccgccgcagcgagcacgctcatcggatgggcggcacgggggaacgagcccatgaacgtgcggaaatcctcgcccaccatggtcttgtggttgatgtcgctgcaaaaccggtcgtattcctcctgcgtcggcaggtcgccgtgtcgcagcagccacgcgacctcaaggaaatcggaatgctcgcacagctgctcgatggggtagccccggtagcgcaggatcgaccgattgccgtctatgaacgtgatcttcgattcgcactgcgccgtggtcaggaagccgggatcaagcgtgacccagccgtcattgcgcagcttggagaccacgatgccatccgggccggccgaagccttgacgaccggcagcgtgtactgattcgaatccacatgaagttcagctgtcgccatgcacgctccttaatcccttgattgagtcgttcgaattgtcaagtcgtcgaaattatcgaattcgtcgtcccggtgccttgtattggacacactatattgcgtgcatgtttccaccaaaaacgccgctccagcacgtggacatcatcacatgccaaagcggcgacggcatcgcccgatacaggccgtgggcgatggacgaccggttgccggtcagtcgcgggtggtcaggatgaccggaccgttctcggtgatggcgatcgtgtgctcgctgtgggcgccacgcgacccgtcctcggaacgcagcgtccagccgtccttggggtcctggtagatctcgtcggtggtcttgaggaaccacggttcgatggcgatgaccagacccgggcgcaggcggtagccgtggccggccttgccgtcgttggcgacgtgcgggtcgccgtgcatgatgtggccgacgccatggccgccgaattccaagttgatcgggtagccgtacgaacgggcgatgtcgccgatggtggaggacacgtcgcccagacggttgcccggacgggccgcgtcaatgccggcggcgagcgcctcctcggtgcacttgatgagcttgaggtcgctcgggtcggggtcgttgccgaccacgaagctgatggcggagtcgccgacccagccgttgacgctgatggccagatcaaggctgacgaggtccccgtccttgaggttgtagtcgaacgggatgccatgcagcactgcgtcgttgaccgacgtgcagatgtagtgtgcgaacgggccggtgccgaagtccggcgcataatccacgtagcacgattcggcgcccttgcggtcgacgatcttcttgtgcacgtactcgtcgatctccagcaggttggtgccgaccttcgtcatggccttgagttccttgagaatctcgccgacgaaacgaccggccggcttcatctcctcgatttccttagcggttttcagttcgatcatgcaacccagcctactgtgcgggggctacttacgcctcggacggccgaacttgaacgcgcggaccatcgaggaaacacccatgacgatcagcgcacatccgcagaaaatcaccaggaacagcatcgacgagaccggcgagaccagtacgacgagaccggcgataatcgagatgatcgcgtacagcaccgcccagccggagctcggcaggcgccatgattcggcgagcgccatcacgccttccatcatccagccgaggccaaccaccatcgtgatgaacactgcgagcgcctgtccggacagggccgcgttcttcagcatgagtacgccgccgaccgacagcattatgccgatgaggatgtccaggatgcgccatccggacggcagtcccaatgtgacgatggcgctgacgatgcggatcacgccggagaccacgaagtagatgccgagtgcgacggccgcgacgccgagcgtcttgccgggccagatcagcagcgcgacgccgagcacgatcgccgcgacgccgatgatgccgtacaggccgcggatcgcgttcttcgccttctgcggcagcatctcctcgatcagccggaacgggctgaagtcctcccagccgccctgcccttgctgctggccgggctgctgttggccgaacggcggctggtaggcgtagggctggccgtacgggcggcctggctggtcggatgcggcgcctggctgcgtctggtattggccggatgcggcgccgtcctgcggcgctcccccgtacgggtattgccgacccgcaggctggccttgaggcgcgtaggctccgtattccggctctccggcacggccggtctgttcgttcccgccgggctgtccgccgtcaccgcgcccgttgtcgccatgtccgtcgctgtgcgggaaaggcccgccatcgtatgtgctcatcatgactccttcaccgttcatgcggcctgccgtcaaccgtgtgcgggcatccgaagcgggccacttcgatatcgtcaccgtcaccaccttattctagacaagttgtccaattcatgccatcaacacaacccgccgttccgtccaataccttgcgtgtcgttcgctatgggaaaagatgggccgcggaaggtcagaaggaacgtcaccgaacccggatagtatgagaccatgaccacagatttgacgtccggcctcgatacggccgctttttcctctgttatcaaaccatccgacgatctgttccgtttcgtcaacggcccttggaccgacacgtaccggctgcctgacgacaaggcgcgctacggttccttcgacaagctcgcggaagacgccgagagccagatccgcgacatcctggaggacgaggactgccccgcagccaagtcgcaggcgctgtaccgctcgttcatggacaccgacgccatcgaggcggccggcgccacgccgatcaggcccgccctcgacgccatcgaccacgccgccgacaaggcggcgctgacccacaccatcggagccctcaagcccatcgacatggggccggacgtcttcgacatcgccgtattcggcgaccccaagaaccccgacacgaacgtcgtgcacctcgaacagtccggcatcggcctgcccgacgaagcctactaccgcgaggaccactacaccccgatccgcgaagcctacgtcgacatggtcgccaagcagctgcgtctggccggctacggcgacgaggagaccacccgcgcacaggcggaccgcttcctcgatgtcgagacccgcatcgccgcgaaccactgggacaacgtcgccacgcgcgactcgcagaagacctacaacccgaccgatctcgccacgctgagcgacgaattggcccacttcgacatcgcggcgtgggccgacgcctggcagggcgcctacgacgccacgccggcggcgaagacccagccggtggacctgacggccgcgctgcagcacaccatcgtccacgagcccagcttcctcaagggcttcgacgccttctggaacaacgctgaccttgacgacctcaagctgtgggcccgcgtgcacgtcatcatcggcaccgcgagcctgctcagccacgactacgatgccgccaacttcgacttctacggcaaagtgctgtccggcaccacccagcagcgcgaccgctggcgtcgcggtgtctccttggtcaacggcgtttgcggcgaggacgtcggccgcgaatacgtcaagcgtcacttccccgaaagctccaagcagcgtatggggcatctggtcgacaacctgatcgacgcctaccgcgtgtcgatcaccaacagcgactggctcggcgaggagaccaaggccaaggcgctggagaagctgtcgaagttcacgccgatgatcggctacaccgagcgttggcgcgactacaccgcgttcgacgtgcatgccgacgccggcctggtggcgaacatgcaggccgcggcgctctacgagtggggcttccagctgtccaaggccggcaagccggtcgacaagggcgagtggctgatgaacccgcagaccgtgaacgcctactacgagccgagcatgaacgtcatcgtgttcccggcggccattctgcagcctcctttcttcaacccggatgccgaggacgccgcgaactacggcggcatcggcgcggtgatcggtcacgagatcggccacggcttcgacgaccagggcgcacagtacgacggtgacggcgtgctcaacgactggtggacggccgacgacaaggccaacttcgagaagcgcacgaaggcgctcatcgagcagtacaacgccttcgtgcctacgcagctggacgagaagtacgccgacgagccggacaaggcgccgcacgtcaacggagcgctgaccatcggcgagaacatcggcgacctcggcggcgtgaacatcgcgctgaaggcctacgcgttcgcgctcgacgaggccgcgggacgcgacaaggacggctccgcgaaggctatcgaggagtcgctgtccgcggccccggtgatggacggatggaccggtctgcagcgtttcttcctgagctacgcctcgatctggcgctcgaagaaccgtgacgagctcgccgagaaatacctgcagatcgacccgcactcccccgccgaatgccgcacgaacggcatcgtgcgcaacgtggacctgttctaccgtgcgtttgatgtgacgcccgacagcgccatgtggctcgaccccgataagcgcgtacgcatctggtaatccgttgccggcaggcaggctgaaccgcgcctgcctgccggcaaatcatcagaattcggcttctcccgccggccgcatgtccccggtcgtcgactcatcgagcggcgattcggcgaatcccgaaccgaactcctgcgcctgtgaggtctcctgcgtctgtgaggcctgcggattatcggtcggggtttcttcgcccagattatcgaacgtcaccggcgttggatgcaccgggcgcgcatccgcctgctgtcccgcgcccgccgttgccgtgccgccgcccggcgatggcggcaggccgggattcgccggcgtgccgttcccctgcgccggggcgtcacgatccgatttctggaacttcttcagttccgacaccccgtaattgatgtcgtggccgatattggtggcctccacaacgatgcgggagcgcctctcatcgttctgggttgtccattcctccgtgctgagcacaccggtcacgatcgccgcctcccccacgtgcaatgacatgcgagcgttggacgcgagcgtcctgaacgccttcacggtaatccatgtggtcggcaggttgcgccattcgccggttccgccatcccggtaccgccgcgtgctgcccatccgaaacgagcatccctcgactcccccgctgcgcccgaacggcaccggcatcgatccgacgaacccggtgatggtcaccgtcccctgttgtatggccatgtcggactcctttccttccctgtactgacgttggaccgccgatcccccttcggcggtgtactcactatcgcagatttcccgccggcatcacatggttttcggacaatgtggtcgaaggctacccctttggcgtgttgtggacagcatgtggatagaaaaccggttatccacaatcacgccgtcaatgccccggctcattcatgaccggctatgctgggttcggtatcgcagacgaacagcaaggagaattcatgggcaaaccgccatggatgcgacagacccgtgacagcgcgaggatgggggaatagtatctgcacatgttcggcatcaccctggcgggcgactggcggccgatcgcggttctgcccatcctgttcggccccgggggcataatgccatggatattgggcggcgccttcaataatcggccctggatcgtcgccatcgctaatgttctcgtcctgcaattcatcatcatcaacgcattgggcgcttccatcggacacttcgccatgtttctgacgttcggtccgcatgtgccgggactgaccgattcgaccaccggccgcgcagcagagcagctgtatgtctccagctcaccgcagacatggattcccggtctcatcaccgccggcatcgccctgacgcttgccgtaatcatggccgctgtcactggggcgagcagcgcaaggcagaacggcacggcgatgaatcgtctgcgcatcatcgcgtacgtcttatcctgcctgggattcgtcgcattgctcatagcaatctgcatagtgcttgcatctctgcgcaacaagcagaccaatatcctgctggcggtattggcgttcctgacactggtcgtttggattcccgggataaaacgcagaagtggggtctttcgcatgaaagaccccacttcgagcgatcaggaaagctgtcggactacttgccgagcagcgtgtccagacgcgacgccagcgtctgcgcagcgtcggcgaccggcacggcggcggaatcggagccgtcacggttgcggatctcgattgttccgttattcacggtgtcacggccggcgactgcaatcagcggcacgccgatcagctcggcgtccttgaacttgacgcccggggagaccttcttgcggtcgtcgtagatgacctcgatgccgcgctcctccagttctgcgaccagcttctcggccgcgtcgaacgccgccgcatccttgccggtggcgacgacgtgcacctgggcgggcgcgatgacggtcggccatgccagaccgcgctcgtcatgatgcgtctcagcgatgcaggcgagcacgcgggagacaccgatgccgtagcagcccatccacacgggcacagtcttgccgttctggtcgagcaccttgaggtcaagcgccttggagtacttgaggccaagctggaacacctggccaatctccacgccgcgctcgaagctcagcgggccggaaccatccgggctcatgtcgccatgacgcacctcgaccgcctcgacggtgccgtcggccttgaaatcacggccgtacacggcgtggaagcggtgcttgcccgtctcgtcgccgccgatgatccactcagtgccctcagccacgtgcgcgtcgatgaagaagcgcaccggttcggcgacgcccgcggcctcgccctgcttgccgaagaccatcggccccatgtagccggccaccatctcgggatgggccttgagatcgtcctcggtggattcctccagctcggcgggcgcgaactgcgcctcgagacgcttcatatcgacctgacggtcaccgggcagcgccacggcgatgacctcgcgccacggcccctcatgatcatcgtcctcggggtgcagcacagtcacggccacggtcttcaacgtgtcggcggcagtccattcgcgaccgtcctcacgcgggtacagacggttggcggtggcgaccagatcctcgatggtcttggaatccggggtttcacggctttccatcgcgggcacggcggagctgtccacggccggcagctctggggtggtcagcgcctcgacgttccacgccttgccggagggcgccagcgcgaacgtgtcctcgccaatcgccatgggggccaggaactcctcggacgcggaaccacccatcgggccggacatcgcgaacacgggcacgtacttcaggtcgagacgctggaagatgcgctcgtaggcgccgcgctcgtcgtagtacgccttcttcatgccctcctcgtcgatggtgaacgagtaagcgtccttcatgatgaactcgcggccgcggatcaggcccgcgcgcgggcggaactcgtcgcggtacttggtctggatctggtagagcgtgaccggcaggtccttgtacgaggagtacatatccttgaccagcagcgtgaacatttcctcatgcgtgggggcgagcaggtagtcggcctcgtgacggtccttcagacggaacaggttctcgccgtattcctcccagcggtgggtggcctcatacggctcgcgcggcagcagcgccgggaagtggacctcctgggcgccgatgccgtcgatctcctcgcggacgatggcctcgatcttgttgaggaccttcagacccagcggcagccaggtccagataccaggagccgccttgcgcacatagccggcgcgcagcagcagtttcgccgaatcggtgtcggcgtcggcgggatcctcgcgcagcgtgcgcaggaacatggtggacattcgaagtgctttggaactcatgggttccaaggtattcgcgttcggggacattgcgggcccggttcagttcggcaaacccgcagtattgaaaaaggccacccacccggagctcaccgagcgagcggccttcgtattggcctcgcggccgtgccgcgcttaccgcgtcatccggcgcagccgttcgagggtaatgccggccgccagcatggccatcgccaggacggtcaccagcgacatgtcgataccggtatgggccagcgaatcggccgcggacgtcttgcccccggcaactacgcccgtgttcgcgcccggcttggcggaagacgagccatcacccgacgtgccacccggcacggtaccgggcttgttctgctcattgccgcccggcgcggtgctgttcggtctgggctgcgtgacgatagcactgcgggcggttcatcagaaaggccgtcaaccgttgcgcgcatggtccctgtacgcctctttctctttgcccgtgtcgctgatgctgctgtgcgacctgccgatgctgccgagatacatgtccgaagccgtcagcgtggctgtcttcactatgctcgcgggagccgcctgtcttatcggcccgggcaatatgtcgccgagcgcatcatcgtcgccttcatcagcgctttgagccttaccgtcatcgcgatcgccgatttcagcaatcgcatggttgagaaaaacctcgtggcgattgccgcatatgtgctgctgccggcattggccgccaccgcatggctgcgtacatgccatcaatggccgacagcgcgactcgcaacctgcgctgaatattcggtgccgccgcgcactacgaggcaagcctcaaatcggtgcaatcgctcggaaaacgcatctcacagctgcgctagcgcaccgctacccggcgaaagtcccatcagcaccatctcacgcgggattgatgtcttcctccgcccaataacagtcccatatccgaaagcagccaccgctagaacagctcggcttgttcgaattcgccagcaggctcgtcctcgtgaggcgtttgcggccggaacgcagccacgccctcgtcgcccagccgcgcgctggcggcctgtgacctgccgcgcaaatcgccgtcgagcatcactgcatccgccgaaaccgcgaacatgcgctcgttgacgccggcaagatacaatccgcccatgcgttccacacgcgagagcgccacatatcccatgccgggcgcgaacgtgcggctcagatccatcaccgcccggtcgagggtcatcccctgcgacttgtggatggtgatcgcccatgcgcatcgcaacggcacctgcgccacggacgccatcaccgtgtcgccgtccatcatctcccacgtggcctgcttcatcgtgacgatgttgccgttctcgaattccacgatgggccagccgcccttgttctcgttggcgaagccgcgcacggtaccgagcgaaccgttgacatactggtggtcggcgtcgttgcgcagtgccatgacggcggcaccggtcttgagcacgaggcactccggtgccagcatgttgcgcttgagccgttcgaccaggtgggccggccccatctggtcggcatggaactcgtgcggctcctcgcctatccgcgcaagcctggaatcgttgagattatcggcctgccggttgacggggaacaggtggaccgccacctcgcccggcttcggtgtcacaccgagccgcgtgacgagcgcgtcacggtcatcctgatccacgcatccggcgcggatgccggtgagcacgtgcagcagccggccgtcgtcctgacgatgctgctcggtcagatagcagatgaccggcgcgagttcgccccacaccagcgattcggtgacgaatccttccggattgagtccggccttcgcgtaccgttcacgggacgccacgaaatccgggccgggcggcagcacgtcgcggtcgcgcccggacacggagaccggcggcagctggaagaagtcgccggacagtaccacttgcaatccgccgaacggccgaggatcatgccgcacttcacggcacacctgatcgaccatgtcgaacagccaagcgtgcatcatcgacacctcgtcgatgatgagcacgtcggccgcctgtatcttgcgccgacgacgggtcttgatggtcttcaacagatttggcgtcagcacgttggcgagtccgacgccgctccacgagtggatggtctggccgtcgatatgcgtggcggcgatgcccgttgacgcggtgacggccacgttcgcgccgtctgcgcgcgcctgccggatgaactcgttcagcacgtacgtctttcctgcgccgggcgcacccgtcaggaacacgttcgcgccggcgttcagaatcgcgagcgcctcagactgccgcatatgccctccttaagctcatgcatcacgcacgatccgcgcgccctggcgtatgacatcgctcgcccgcgggctcagaccagccggcggaccacctgcagcacgccgtgctcggtgttggccggcgcgatgtaccgcgccgcgcgtttcagatccggatgcgcgttggccatggcgaacgaccattcgccggcgtcgagcatctgcaaatcgttgagatagtcgccgaacaccgccgtctgcgcgggcgtgacgccgagatgccgctgcagcgcgacgacaccctgccgcttgtcggttccgggattcatgatatcgacccagtgcgctccggataccaccacctgatgggtgcgttccacatcgcccagcaggttcgcggccatgccttgcgcgtcgccgaaatcgaagatcgccagtttcagcacggtttcgtcctcggtctccagcacctcgtgcaggtcgtccacgatgcgcagcgccttgtagtatttggagcattcctcgacgaacggcctgtcctgccgctggatgtacgccgtgttcagaccgcatatcacgagtccgatgtcatgcgagcccgacgccaccgcggcgtccaccagatcgatcagcgtacgcgtgatgtcccagctcaccccgtgcacgtcgatgacgttgtcgtcggcgaccacgacgttgccgttctccgcgatatacgacatggcgccgtcgacgcggtccgcgaacatggagcgcagcgtggcgagctggcggccggaagccggcacgaactcgacacccttggcgtgcagctcgtcgagcagcggccagaagtcatcggggatgttgctgtcgccgtccagcagcgtgccatccatgtccgccacgatcaggcggatgtcgtgcggcttgtcgcagatggcggtccaatcgttcgcggtcatggtgtcgttcctctcagtcgtgtgcgtgacgttttctgtttttcgagaccggccggctacttattcagcaggctggtggcgacgatctggtcggcgatggccttcgactcggcctcgttcggcccgggagccggcgccatgaacgcctgacggtagtagcgaagctcgtccagcgactcgatgatgtcggcgagggcgcggtgcccgccgttcttggcggggcggttctcatacaccgcggggtaccagcggcgcgcgagctccttcagcgtgctcacgtccacgctgcggtagtgcagatggctcatgagacccggcatgtaatggtcgaggaatttcttgtcggagccgatggtgttgcccgcgagcagcggcctgactccgtccggcgtgaaccgcagcacgtattcggtgaccttgtgttccgcctcttcgaggctcaggccgtgctcccattcgttgatgagcccggaacgggtgtgcatggcgcgcacgaagtcgttcatgtgcgcgacggcggcgtcggacggcttgatgacgtagtccacgccttcgtccaacacgttgaggtcgaaatcggtaggcaccactgacacctcgacgagctcgtcgccaccgaagatgtcaagtcccgtcatctcgcaatcaatccagatcaggcgcgaatccttcgcgctgtacgtttccgcatcatggctgtcgaccatcgcaagccgcctttcctgctgtgttttcctagggaacgttacaggctatagcagaccggggacgcgccgtcaggccagcgggaaagagagcagcatcgtagtgccggacggggacgaggactccaccgcgaccgagcctccataccggttcgccacatcacgggcgagcgcgaggccgagcccgtacccttggcgcgcggtgccgtcatcgtcccgggcgaagcgggacggatataatcttggacattcgggacgcggccggccgcgcgccattacggcagcgcaggaacggcagcggtacatgcatacggccaggaggactacatggcagaggaaacgcaatctatcacgacgcggcacgacgccgagaccgacccggcactgtggtggcggcaagccgtggtctaccaggtctacccgcgcagcttccaggacaccaccggctccggtctgggcgacatcaatggcatcaccgggcggatcccctatctgcggcagctgggcgtcgacgcgatctggctgtcgcccttctacccgagcgaactcgcggacggcggctacgacgtggccgactaccgtgacgtggatccgaagctcggctcgatggacgacttcgaccggctggccgccgccgcgcatgcggcagacatcaaagtggtggtggacatcgtgcccaaccacagctcccacctgcacccctggttccgtcaggcgctggcggacggccccggctcccccgcgcgcgaccggtacatcttccgcgacggcaagggcccgaacggcgacgagccgccgacccgctggcagaaccatttcggaggtccggcatggacgcgcgtggacgacggccaatggtacctgcacatgttcgccaaggagcagcccgactggaactggaggaacccggacgtgcgcgccgatttccttgagacgctgcgtttctggtgcgatcacggcgtggacgggttccgcatcgatgtggcgcacgggctcgccaaggacctcgaccgcgacgacctcgacgactacgtggtgatgagcacgaacgacatgcccgcggacggatcccacccagtgctcgaccgcgacgaggtgcacgacatctaccgtgagtggcgccgcgaggtgttcaaccgctacgatcccccgcgcttcgcggtcgccgaggcatgggtccggccggaacgccagtacctgtacgcgtcaccggatgaactggggcaggtgttcaacttcgagttcgccaaggcggattggaccttcgacgcgatgagcaaagccatcgacgaggggctggcgtgcgccgagaggtcgggctcgacgtccacctgggtgatgagcaaccatgatgtgccgcgccacgccacgcgttacgcgctgccgcaagtgccgaccggcgaataccatcagatcgccaacgactggctgctgcgtgacggcaccacctatatcgaggatcgccaggccggcgcattgcgggcacgcgccgcactgatgctcgaaatggcgctgcccggctcggcctacgtgtatcagggcgaggagctgggcctgttcgaggtggcggatattccatgggaccgcatcgaggatccctccggcctgcgcacctcgcgggcgcagtccactaagggccgtgacggctgccgcgtgccgctgccctgggtcgcgtccgacgtgcccgagacgtacacgtccgacaagaggcacgtccatgccggctcgttcgggttctcccctgccgtcagtgacgccgaaccacacctcccgcagcccgcgtggttcaaggatttcgccatggacatccaggacgccgacgacggctccatgctgaacttctatcgtcgcgtgctgcggctgcgtcacgagatgcagactccggacaccagttgcacgttgcttcccgagaaccgtccgagcggcatgcgcgacggcgccgacggccagcccggcggcgtgatcgcctaccgtcgtgccaacggttgggcgaatctgacgaatttcggagccacaccggtttcgctgcccgacggcgaggtgctgctctcgtccgcgccgctcaccgatgacggccggctgccgcaggatacgtccgtctggatgcggctgcggtaggcctgcccgcgccagccacgatgcgggcggcggagccgattcgacgcggccgggcctatatgcaagatggcgggctcccctcgcaaatcgtgaggggagcccgccatcatattcatatgagccgaatcctatgaaccgatcggcatcggcctatcagttgtggaagccggtgtagttcggcgcttcggtggtcatcacgatgtcgtgcggatgcgactcgcgcaggccggcgtcggtgatgcggatgaagcggcccttctcctgcagctcggcgatgttgtgcgcgcccacatagaacatggactggtgcaggccgccgatcagctggtacagcacggcgttcagcggtccgcggtacggcacttcgccctcgacgccttccggaacgaccttgtcgttggaggtgacgtcggcctggaagtaacggtccttggagtaggacttcttgccgcgcggggccatggcacccagcgagcccatgccgcggtacagcttgtactgcttgccgtgcagcaggaccttctcgcccggagcctcctcgcagccggccagcgtgccgccgagcatgacggtgttggcaccggcgacgagcgccttggcgatgtctccggagtagtggatgccaccgtcggcgatgcacggcacgccggcggccttacatgcctgggcggcgtcatagacggcggtgagctgcgggacgccgacaccggcgaccacgcgggtggtgcagatggagccggggccgacaccgatcttgacggcgtcgacgcccgcgtcgatcatggcctgggcgccggaacgggtggcgatgttgccgccgatgacctgcacgccgcggaaggcggggtcgcgcttgatgcggctgatcatgtcgagcgccagacgggcctcgccgttggcggtgtcgacgacgagcacatcgacgccggcctccatcagagcggaggcgcgctgccaggcgtcgccgaggaagccgatgccggcggccacgcgcagacgtccctgctcgtccttggtggcgtccgggtactgctcggtcttgacgaagtccttgacggtgatcaggccggcgagcttgccgttgtcgtcgatcagcggcagcttctcgaccttgtgctgggcgagcagacggtgggcgtcatccttggagatgttcgccggaccagtgatgaggttctccttggtcatcacgtccttgaccttgaggtggtcgtagtcttcggacgggatgaagcgcatgtcgcggttggtgatgatgccgacgaggcggttctcctcgtcaacgaccggcaggccggagatgtggaacttgccgcacagcttgtcgaggtcggcgagcgtgacgtccgggttgacggtcagcgggtcggtgatcataccggactcggagcgcttgaccacatcgacctgggccgcctggtcgtcgatcgacaggttgcggtgcagcacaccgataccgccgttgcgggccatggcgatggccatctcggattcggtgacggtatccatcgccgcggagatcgccggaaccttcatggtgatctcacgggtcagatgagtggtggtgtcgacttcggagggaatcacgtccgtctcgttcggcagcagcagcacatcgtcatacgcgaggcccagcttggagaaaatcggggggacgggagcataggattgcatattcgcttcagaatttgtagccatgtattcactatatgagcgtaatgcgacgaatgcgacacgaacatggtctcgaccatcatcatcggcaggtcacgggcgccgttttttcccgtcaccgctttcgtcaaacgaatgacgtgcccgtcgccgcgcggatgcatacgactggttctccgcggcgatctccggcaggcgacgcttcagatacgggtacatcgtcgccaccgtcagcaacaccacggcgatgacgaagccgatgagcacataatggaccttgaagaacaacgtcatgatcgagccgaccgcgatcagagccgcccacccccacagaatcagcaccgctccctgcacggtgtggccgatgcgcagcatgcggtggtgcagatgcatacggtccgggtgcatcggcgactgcccgtggctgagtcggcgcacgatcgccagacacatgtccagcactggcaggaacagcaccaggatcggcagcaggatcggcatgaacaccggcaggtacacgctggcatgaatcgacgccggatccagacggccggtcatcacgattgacgcgcaggtgatgagatacccgagcagcatcgagccggagtcgcccatgaacagcttggccggatgccagttgtgcaggatgaacccgatgcagatgccgaccatcgccacgtcgatcagcgtcgccatcgaggcgtaggacggcgaattgcgcgcgatgatgtaggagtacgcggcgaacgcgacgccgccgatggcgacgatgcccgccgcgaggccatccaggccgtcgacgaaattgaccgcgttgatcgacgcgacgatcagtatcgcggtgatcgtcaccgagatactggggctggcggtgatcagggagccgatcggcagcgatatgatctgcaggccgccccacgccacgaacaccgagatcagcagctgcccggccatcttcagcatccagtccagatcccacaggtcgtcggccatgcccagcaggcatatcagcaccgcgccggcgaggatcacccactcctggttgttgttctcgaacagtccggtcgtgaatgcgatgcgactggagtagatcattgcaaacgcgaatccgatcagcatgcccagtccgcccatgcgcggcgtcgggatggtgtgcacgtcgcgcgcacgaacctctccgaccgcgccgatatggatggcgacatggcgaatcagcggcgtgaccagccaggtgacgccgcctgcgatggcggcgatcagcagatatatcctcatgcgcccagaccaccaccgttcatgtgcacggccttgcgcacgacgggctgagggatgacaccctctcgcaggatgacgatgccgtcgcgctcatgagggtcggcggcgaccaccgtgctggcgacatggccttgcgtcggcccgccgtcaagatacagctgcacatcgtcgccgaacgcctgcacggcctcttcgaccgtctgcgcgctttcgtcgccggaacggttcgcgctcgacgcggcaagaggaccgagctcattcaatatgcgcagggtcagggccgaattcggcacgcggatgccctgcgtacgcctgccctgcggggtggcactgaccgtggcgagcgtgcagtcctcgcgggccaccgcgatcggcgagaacgcaccaggcaggaactgcgcggccagccggttcagcggcgacggcaagtcgagcccgagcccgtccaactggtcgacggatgccagcagcacctgcagcgctttgaagcgcgggcggctcttgacctgatagatgcggtcgattgcggcctcgttgcgcgggtcgcaggccacgccatacaccgtgtcggtgggaatgaccaccaagcctccgcctgcgatgaccgacgccgcctcggcgagggattcctcattcaccttgcgaaccgcactcatcagacctcccgtatcgcgtatcacgcccatcgcggcggtcacatgccgccacgcgtatccgaataccgctatccaagtattatggcacgtcctgccacaccgatggtaggccggtgcatggcccgacgccacgggttcgctctcccccgcgtcgcgcgggccggcctggacacggcttcccattgcaccattgcgccacgacttggcgctggccggcgccggcgacgacgggcctcatgtgacggtacggcgagagacacgaccgtatccgcccgcgagcgcgaggaaatgctcgccggcaaactctacaatcccgccggccccgagctctccgctatgcgagagcgcgcaggcgacttgtgcacccggttcaacgcgctgcctcggggagaccatgccggccgagccgcggtactggacgagctgctgccgccgatgcatccgatccggttccaggaccgcaacgtgcggcgtgcggctgacgggtcgtattacgactacgagtatggcaagccgatcgtgatcgggtcgaactgctggttcggcggcaatgtgacggtggtcggcggcgtgacgatcagcgagggctgcgtgatcggcgccggctcggcccggccacggcatcagatcctgggtcaggatctgaccgcgaacaggtaccggggccggccggtccagtcgtcgccggtatgagcctggccgaacccgttggcctgtgcgaaggagaccagccgcggcccctgagagatgtcatgctccatcaccagcacgccgccggggcgcagcaatcccgccgctcgcatcacgatccgctccggtatcagcgtgccgtcggcggagccgccatacagcgccaccttcggatcatggtcgcgcacttcgggctgttcggggatctgcgcttcggggatgtacggcggattcgtgaccaccatgtcgatggtgccgtcaaactgggtcagcgtcgtgccgctggtggcgtcgccgagctcgagatgataattatcggcggccagcgggtcgagacgtgatatcctccgccagttgcgcatcgtccagtcataggtgcgcggcaccttctcgaccgcccacacctgcgcgccgcgcacctcggtgaccagggacagtccgatggcgccgctgcccgcgcacaaatccacgatacgcggggtggacagccgttcgcgcgtgagccagtcgatgccggcctgcaccacggtctcggtttccgggcgcgggatgaacacgcccggaccgacttccagatcgaggtagcggaacggggcatggcctgtgatgtactgcaacggttcacgtgcggcccgccgagcgatcatggcgtggaatcgggcgagcgccgtggtgacggcatcgcccacagtgtcggagctgtcggagctcgcggcgccggcatccggggcatcaaaactcgcatgctcgtgtggcaggccgtccagaggctcccccatcaacatcgccttgtctatgtcgcgcaggtcgcggccgcacgcctcggcgagcaacaacttggcatcatgctcgggcgtgtcgatgtcggcgtcatgcagcgtccgcgccgcggagcgtatcacgtctgtcacgtcatggatggattcggatgtcatggtgtccttccgctcgttggtggctcatcgtctcagggcgttcatatcacggcgtttcgcaccggggcgtctgccggcatattcgccgttgcgtcgctaagtgcgcgccgaaacgacaagtgcgcgcacttaggaacggaaaatccgtggtttgcgtcgctatgtgcgcgcgtacttcgtttcggcgcgcacttagcgacgcagagacatcaacgggggtgcgattccccagggaaccatcactctgaccccgccgatggccggtcactgctggttggcgagccgctcggcctcgtcggcttggatgtcggagtcgatcacggcctgcaggtcgccgtcgagcacggcgtcgaggttgtacgccttgtagttggtgcggtggtcgacgatgcggttctccgggaagttgtaggtgcggatgcgctcggaacggtcgagcgaacgcacctgcgagtggcgcatatcggcggcctcggcggcctcctgctcatgcttcatggcgagcaggcgcgatttcaggacccgcaacgcggcggcgcggttctggatctgcgacttctcatcctgcatgctcaccacgatgccagtggggatgtgcgtcatgcgcacggcggagtacgtggtgttcacggactgtccgcctggaccggagctcatgaagatgtcgattttcaggtccttcggatcgatctcgatctcgtcgtcgtcctcgtcggcctcggggaacacgattacaccggccgcggaggtctggatgcggccctgcgattcggtgacggggatgcgctgcacgcggtgcacgccgccctcgtatttcaggctcgcccacacaccgtcctccggcgcgggcgtgcccttggcgcgaatggcgatctgcacgtccttgacgccgccgagctcggtggtgttctcggactgcacggtgacggcccagccgcgcttctcggcgtatcgcagatacatgcgcagcaggtcgccggcgaacagcgccgcctcctcgccgcccgtaccggccttgatctccatgatgacgtcccgggcgtcatcggggtcgcgcgggatcagcgcgttccgcagcttctcctcggccgccggcagctcggcttcgagccgcttggcctcatcggcgaattcggggtcctcccccgccatctcgcgcgcggcctcaaggtcgtcgcgcacggccgtgtatgactgatacgcggatacaatcgcgccgagttcggcatgacgacgacccagcttgcgcatcttatcggggttcgtcaccacctcggggctcgccatccgctgttcgatggattggtattcctccaacgcggtctgtgccgcggggaactgctcgactgccatgtctggcttgtccttccggatagtaacaacggtcggcaccgcgtcatcatcgctgtcgcgacgccattacagatacaaaaacgccagtcccccgagcgggtgcgccgaagcgcgcccaacccgtgcgggactggcgtcagatacgctacttggtcttcttgccgtaacgcttctcgaagcgagcgacgcggccaccggtgtccagaatcttctgcttgccggtgtagaaggggtggcacttcgagcacacgtcgaccgtcatgtggtcgcccttgtaggtggaacgagtgacgaaggtgttgccgcatgagcacaggacttcaacggcatgataatcaggatggataccctgctgcatggttttgtctcctaggggattcgggggacccgggtcgccgcgccccgatggctggcgtgaaccggaacctacggaagtatacgccgaggcatggatttcagtggggccgcaggggcttgaaccctggaccggcggattatgagtccgatgctctaaccgactgagctacagccccacgttggcgaagaggccaactatattattgtatagcagaccatcggacttgcgacaccctcccagccgcccatcgtctgccacggctatcatgtcggcagggccggcaatcgggccgggacacgcggaaaggaacgcacatgcgcattgcggtaccgctgcccggcacgatgtgggcgttcgacgtcatctccatcatccagatcttcgacgacgattccgtcatgtacggctcgtccgaccgtccggtcatcgacttcatcgcgaatgcaagctccaaggcactcgaccacggtatgtccatcgccaccaccgcgctgcgcgactaccacgagaaacctgatctgatcatcatccccggtttcgccaacccgcatgagatcgccaccgacaggcgcaccgggaacgccaaggcatggctgttcacagccgatcccgccgacgcgctcgccatccgcgactggctggtcgcgtcccaccgcgagggcgtggagatcgcggccatgtgcacgggcgtgttcgcgctggcatggaccggtctgctcgacggcgtggaatgcaccacgcacctgccgttcctcgacgatttggccgcgcagtttcccaaggcgctggtgcagaaggaccgtctgctgacgcacaacgcgaagcagcgcatctggacgtccgccggcggcagcatctgtctcgacctgtgcatcgcgctgctcgccgaacatgccgggcagtccctggcgacggcggaggcgaacatgctgatgatgcattacccccgttcggtggccacccggcgcagcgacggcgctccgtccgtcttgccgcgaccgtcccggcagagtgacgagatcatcgcgctgacccgcagagtccgcgagcatctcagttatgactggacgctgacgacgcttgcgcagacctcccactcctccacgcgctcgttccagcgccggttcagcgaggtcatgggggtgccgccgagcatctggctgctgacggagcgtctgaacgccgccaaggaactgctggagctcaccgatctgccgatgcagcagatcgcgctgagaacgggactgcgcaacgcggattcgctgcgcaagcatttctccgccgcgttcggcgtcagtccgagtcggtatcgtcaggattttttgcgcaccgaattgcgtccgacggaaaacgtgtgagcccgctggccggcgaaacgaacatgaggagtcggatatcggccacatgacgcggatctctctgtgttcgttttgttcggtactgtgcgcattcctcacacttttcttattgagaatgattcgctgaaccatcggcggggcaaagtggcgcgttcttaccgatatttggcgcgaaccgaccgcatcggcacccggttttcccgcgaccgacgcttagactcggacttgaaacattgttgttaacgccatcatgacagacgcggatgtgtgtcatgccggcgcgatgaaaggatacgaacatgtggcctatcctcttggccctggtccccgcattcggctggggttttcagggcattgtcatgcagaaggtcggcggcaccaccgccaacaagcagatgggcatggtgctcaccacgctgctgttcggtatcgtggtgctgatcttccacccgatcaactggtcgtggacgctgatcgcggccgcggccatcaacggcatcccgtggagcatcgcgcagatactgcagatcaagtccttcgactatctgggcgtggcccgcgccatgccgctgtccactggcatgcagctggtgttcaccaccctgctcggcgcgctgttcttccatgaatggacgcacggctggcagttcggcttcggcatttgcgcgctcgtcgtcatcatcgtcggcgtcgcctgcaccgccttccaggagaagagcgaggacaagggtccgtcgaacctgaagcgcggcctgctcatcaccctgatctcctcactgctgtataccagctacgccgccgccggcaagttcttctcggtctccagctgggacatgctgttcccgcaggccgtgttcatggtgctcggcacgacaatcatctccttctgcatgagcggcaaggacgcgatggaccccgaaattggcgtgttcggcaagaagagctggatgaacatgagcaccggcgccctgttcgccaccgcgaacctcaccgtgatgctgtccaatgagatgaacggtctggcggtcggctggacgctatcgcagatgaacgtcatcgtcgccacgctgggcggcctgttcattctcaaggagaagaagaccaagaaggagatggcgttcgtcatcgccggcatgattctcatcgcgctcggcggcatcctgatcggcatcacgaagaacgcatgaccgccgcccgcgcatcatcaaccatcacatcatcaacaagtcaacaagggagtatcaaccatgatcaatgtcggtttcatcggatgcggcgccatgggccgcgaccacgtgcgtcggatcacggacaaatgcggcaacgcgcaggtcgtcggcgtatacgacaccgtgctcggcaacgcgaagcaggccatcgaagacaaccgcctcgacgcgacgatctacgattcggccgatgcactgatcgacgatccgaacgtcgacgccgtcgtcatcgccagccgcaacgacgtgcatctcgacccgctgctgcacactatcgcgatcggcaagccgacgttcaccgaaaagccgatgaccatcaacggctccgacagctggaaggtcgtcgaagccgaggtggccaagggccgcaaaaccattcaggtcggtttcaactggcgcttcgaccccggctacgacgcgatgaagaccttcgtcggcgacggacagatcggcgccctgctgatggccggcatgcgtcactacaacgcgcaggcatccacgagctactacggcaccgacaacgtcatcaacgacacgctcatccacaacttcgacatgctgcattacatgttcgacggcgacatcaccagcgttgagatgaagttcgcccggatgaacacgctcaacccgaacggggagtccttgcgcgaaccgcagctggccatcgtcgagttctccgacggagccctcgccacagccgaggcgaacgtcaactgccagtacggctacgacatccaatgccgcctggtcggcgagtccggcatcatctcgctgccggatgtctccacgccggaggtgcgcaaggccggtcagatcagccacgcgatctcgtccgcctggttcgaccgattcatcgaggcatacgaccgcgagttcgaccggttcttcgcgaatatcgaggccgaccggcagccgggcggcaaggaggcgaccgcatgggacggctatgtggcgaacgtggttgccgacgccgcgctggacagcctgcaccacggcgggcgcatccccgtgacgctcaacgagcagccggcgctgtaccggtaatccgccgtttgttcaacggctcagcccgccagcgggggcaatgcgtgcatcctgctggcggaaatttatgacgccaacagggcgacacgtccaggctcaggccgcccaccacggacgcagcgggtaccagttgcccttcggcagcccctccttgtcgggcttgacggcgaggaactgatgcacctggatgccgttgagctcgaagttcaactcgcacgcggccagatacaggccgtacaccttcgcccgctcgtagccgacctgcttgacggcgtcggcccagttggccttgagattggcgttccaatgatgcagcgtcagcgcgtaatgctgccgcaggttctcctggttgacgacctcgaagccggcgtcgtgcagcgccgactcgatgaacccgggcgaggcgaggtcgccgtcggggaagatgtatcggtcgaggaactcgtccgttccgggccggttgttcggcttgtccttggagatcgtgatctggtggttgagcaggcggccggccggcttgagcagcttgaacatctcatcgaagtagtggcggtagttcttcgcgcccacatgttccatcatgcccaccgaggtgatgccgtcgaagtctcgttccggcacttcgcggtagtccatcacgcgcagctcggccagatcctccagcccttcgcgcctgatccactcctgaccgtactcgatctgctcgtgcgacagcgatacgcccagtgccttgatgccgcgcttggctgcggcgatgaccagagcgccccagccgcatccgatgtcgagcatgcggtcgccgggcttgaggtccagcttgtcgagcaccaggtcgattttgttgcgctgcgcgtcatccaggctcatgtcgggcgtgtcgaacaccgcgcacgtgtacgtcatcgacggtccgatgaagtcggcgtagaactcgttcgacaggtcataatggaagctgacggtctcggagtcggccttttcggtgtgcgggaacagaccggacttgatgcgttcgaatttcgaggggccttcggactgcggcacctccaccttgtggtagccgtggctgagaacggccgcccccatgcgcgccagttcgagcggagatggctttcggatgtacgatgccagttcgacgagcttgcgcagctgcggatacgggtcggccacgtccagtccttcgatgtcgaagtagcccaggatgtatgcgcgggccaaaccgatctcgttcaggttgctcgccaactgatagatggccttaggactggtgacccggacctgcaggtcggcgtcttccggcccgaacgtcgatccgtcgaaggcttcgatgcacaccggcgcgtcctctttgaggaccgcctgcgccatttcacttaccaacatggtttttccactgcccatgtttcgcctcttttcccaacgactgcgacttgccggatatggcaatcaccgtgtcactgtagtcccgcgtcgtcatttttcgcgctgcgaggaaacaaaaacgctcactatgcatgcatcgggcaaccactatgtgaccggtcactctgaaagcgagcatttggcggatatatatatggacagcgcggccgcgccagtcgcattccgcatgtgaatcggaacgcggccagcggggccgcggttttcaggatgatcccggaccagccgtcatgagacggcgttcgtgtactccttcagggattcgccgatgccgccggactcgccagacgactccaacgcggtgacgtgcccatcggtatcgacgtcaagcactccggagattgggttgatggcattgtagacgacgtcatattcgttgagtagcagcaggaactcggcggtgccactcgccttcgcctcgttcagcagcgtggttgacgtctcgcgtcgaacgatgccgctcttgtcgacgccgcccacctgcgcgacctcaatgatgtcgccgactttcgcgtcgcccttgatgactttggtgacacgcacccgggtgacggtctccggcacgcccagcgcgtccatgtcgatgtcgtcctccgtcagcccgtattgcgggttcgtttcaggcgttccggacgtgaaatcgatctcgggatacaggatgcgctcgcgcgagtcgagcgggacaccggtgaccaccagaccggcggccttgacgccctcttcgacggaagagtagccgggatagtcggcggtgatggactttgcggtcttcgccgtggtctccgtcgcggtcttcgccgtattctgcgtcgagtggccagcagtcggagagccgacggaatgcatatgcacggcgacacctaccaccagcgccgcaacgagcgccacgacggcgagcgtgcccttgatgacgtttgactgcttcatcagtaacagctcctcacgtaactcatgtcatatgcctgaggcatacggatatatctttcaatcacagttcagcaacggtattcatcagcggccagaccggtcggctgattgatccgtcgattattttttttcatatcagtctccgatgtccagcatgcagtgaatccgcgccaacttcgccgtcgacagagcattgagtaaagaacagccgtttttctgtaaaagattaccggaacaaaggacaatggaaagaactgaccctttccggtgttgaatttatacgacggtttctgatgcacgtaccgccaaaacgttttgtcagaattcggcattatggtttgttatgttctcgtactaaaagcaagaaacttactttgtgccggaatcttcttggctgccaaaagtatctctcaaagctgcgtggtaaggaaatgccggaaatattaaaacaactttatgagataaacatttgtgtatgtaaatcctgtggtgggcatcttggaaaaccacagcttagagtaccgcaaagatgttaaaatcttgttctttcatatgttttctgaagcctcaatgtttgaggttttgttgttgtacctatttatctgaaaacacttgatttctgtaacttctgcacaggaaatcctgtataatcatgtataagaacaaaagattgaaagtccataggtagcagctacacggacgcccactttgttcaattaggtcaaatcgaaaatggtgtaaacgaaggggcagttcactggaatgccaaaactgctttttcgtttaccccatcatcgattctaacctaaagaatttttagggagtgagaatagtatatggacagttggtttaccgtcgaacaaatagaccaagatacattcgtcatcagcgaatacagacactgggaagaaacacattgttatccattgtgtgggacaaaaagagccattctgattgatacaggtttaggtgtttccaacatcagagaggttattgatggattgacgaaactgcccgttacagtaatcactactcatgttcattgggatcatatcggtggacataaatattttcggtctattgcagttcatgaagcagaaaaagaatggctatcggtcaaattccctatacctttgcaagtggtaaaaaacaatattatgtgcaatccatgtgatttccccctcggattttaatgtagagaaatatcagatttttcaaggggttccgcaaatgattttacatgatgaagattgtattgacttaggaaacagaaagttggtagttattcacacgcccggtcattctcccggacattgttgtttctatgaagcggatagaaaatatctgtattccggcgatttgatatatagcggttgccttgatgctttttatccatcaacaaacccacaagaattttggaagtctgttagaaaaattcaatctttaaagataagtcgaattttgccaggacatcatcatttatctattccagttactataattgacaagatagagacagcttttcacaacttgtcaaatgaagggaaattaaaacaagggaatggtattttcagctatgaggggtttcaaatccatatctgaaatgcaatcttagttttacaattttatacaataacaaaataagagaaacgctgtaaattcaacgtttctctcacttttcatcaatgccacagaccggaatcgaaccgttttacttaatctcaaatactgatagaaaggggctttgaagacttcatcacggttgcggtgttcaaaaagtgttcaaacgtttgttgcatacaaactgaaatttgtcatatccctatttctgagtagattttttcgacaaacggtgacttatgttcgatatacttctcaatatcaaatggatagagcgcagcgccttcttctttaattctactgtattcacgcacagcttccggatgagaacgcaaatattcacggaaagcaatatgccttttcagttcctcagaatctcgcgggcatacatatagatgatgcttccgcaaatgggttttgccttcatatttaaatgcttcccgtccggcaataccaaggtttccttcatggtgatagtcgattctttctaaggcagagattacagcgtcaagcatggagtaatctttaatgacgacatcaatatcaataatcggtttcgctgataaaccatgcactgaagtgctgccaacatgttctattgcaagagccagttgatcaagagcttcctgaatttcactcttgatttcacaaaaatcccgcgcccagtgtttatcataaggtagcacaacaacatgctttgtaatcattctctttacctccacaaatcccgatttgtctgtttcacaatgtcaataagaggaagaatgacaggcttgcttttcagaatcttggtatttcatcataaagtgttcaaaggtgttcaaacattttatataaaaaacagctatgaccaaggtaagtattttcaaaggccggcatcggcatatactgtgatctatgattactacgtttactattcgcaacgtcgccaatgaagacggtgccgcgcagatcagcgatttcggcgctcacgtgctctcctggacgcccgcgggcggccatcccgccgtatggcagcccaaggccgtctatctgggcaaaccgatccgcggaggcgtgcccgtggtactgccatggttcgcactcggtttcgagcatggcgaaatcgccggtaagaagccgaagcacgggttcgcccgcaccactgtctggcatgtggacgaggacgcgaccgacgaccgacgcatccgatacacgctgtccgacgccgacgcgacgcccgaactgctcgcccagctgcattccggggcctccccgcggttccatgcggtctacgacatcgaagtcggcaaggagctgaccatgacgctgaccgtcaccaacgacggtaccgagccgctgcgctatgagaccgcgctgcatacgcacttccatgtcggcgacctgacccaggtgagcctacacggattggagggctccgactatctcgacgccacggtcgccgggtaccctccccgcgtgcagcccgatgagccggtgaccttcgacggcaccacggtcgaccgcatctactactccaccgacacgttgcgtctggatgacccggcatgggatcgcgtcatcgtcatcgaggcccatggcacgaagcagaccgtcacatggaacccgggaaccgcggccgacaccgaaatcggcgacatgcagcccggcgaatggcgcgatttcgtagccatcgaggcagccgcctgccgcgagtatgccatcgagctcgctcccggcgaatcgcacgcgctcacgcagcgcatcagcgtcgagaaccgctgaaaaaccgattcattcatacggccgccgcatctgccggcggccgtcaccatctccggcggcaaccgttcacagcagctgatacagcgcggcgctggcgttggctatcgccgtccacgacgagccggaagtcatgatgacgaacgcatagtcgcccttgccggaatatacgatgcccgcatcatgcaggtacgagtcgcgaatccgaccttgtcggcaacggttccgttgccgccgatgccggccggtatgccgctgcggtactgctgccgtttcatcaggccgatcaccatgtcccggtcgtcgtcgttccaaatctcgccccgatacagtttggtcaggatcagcgccagatcggccgatgtcgtgcgcacgtccagataatgcaatgtcgtgttcttcgcgccgagcgcgttcgcctgctgcgttactttgtcgtagccggtgccgttatcgcgcatcagccatgccttgggacattcgttgtcggaatcaacgatcatcgtggtcaggcactgctgcagcgtcatgccgttgagcggcgaatcccatgtcatctcgcctaattccacggccgtcaccatcgaatgcgccacgaacagcttgtacgtgctcgccgatgcgaacacctgggaggagtcgatgtcgacgagtgtgccggcattgctcagatcgaccacggagacggaatatctcgcgccggaaaacacaccggccagcgcggcggatgcttgggcagtcaggtcgcgttcgggctgggccggagccggcacggccgccttgaacatgctccgagacgccgattgggaacgaaccctgccggaccccgacttgtcggagaaactttcgtcggaggagccgtcatcggcggcactgccgtcggtggggtcgacggtggcaccggatcgggccgcaccggctgatgaaacgctgccggacgagccatcgccatcgttcgagcacccgcgcacggacaatagcaccaccatcgtcaccacggagaacatcgcgatcagcaccgtcagacggcggcgcacatacgtcagctcacgggtggatattattcggccgccaggcgggttcgaccgccgacgagggccgacacgaccgccggcatgcggcacgatgccgcgcaggatacgtcccgtcctgcgccgcggcgggcgcatatgctttgccatcgcgcacctccccgactgctcacatcgacgcccccattgtaaccccccgaacgcagctagtcaggggcgagcatccacaccttggtcacccgtcatggcacggctaagacaggtcatatatacgacaggtcatatatgacagccgggcgtcggcagtatcgacaggtacgtcaatgccgccgacgcccggccggtcaatgattgctcagcgaccgcggcggaacggcgccgcgttgcgcttgccgtgcgacttgcggaatcccgcggccttgcgcgtggcacggttcggcccgctctggctcctgcggttccgcccgtcacgacggttgtcaccgtcgttgttgtgcgagccgcccttgcggtcctcgaacgacgtgtcgtggaaacgcccgttgcgacggttactgcggcgatcggcctcgcgaccgtcaaacggcgtgttgaaatcgtcgccgaagtcgttgccacggcgcttcttgtcgcccttgcgaccctcagcgtcacggtactgacgccggtcgtcaaaacggccgtcatcgaagccggagcgcccgtatccgtcgaaacggtcccgcttggtggtgtgcttgcgcttgccgtgcggcttgccctcgccgatgatcgacatctgcgattcgtcccgatggtcgaaccggtattgggcgctctcgcggccctccatttcggcgccgtcatgacgatggccgtcacggcgtgcggacggacgggagaaatcatgctcgccgccacgggcgcgggacttgcggccggaacgtccccgcccgccgcgcgcctcaccaccgcgaccgcccttgcgatcggagcggccggtgcgctcggaacggcgcaaagcctcaagcgccttgtccagcgaccagccctcgacgaccggcgcgtgctcgccgaccaactcggtcagatcttcggacgccggcgtgattgccaccgacttgactcggatgccggcgcgcttcatcatctggcgagtgctgcgggcctggttcggcaggacgagcgtcaccacgtcaccctgttcgccggcgcgcgcagtgcggccggaacgatgcaggaacgatttggggtcggccggcggatcggtctgcacgaccagcgtcacatcatggacgtcgatgccgcgagcggccacgtcggtggcaaccaatacgcgtaccaggcccttctcgaacgccaacaggttgcggtcacgctgcttctggctgaggttgccctgcagatcgaccgcgggaatgccctcgtcgatcagtttcttcgccatcttcttggcctggaacttggtgcgcgtgaacaggatacgcttgccggtgccgctggccagcagacgaatcacctcatgcttgttgccctgcgacacttcgaacacgtgatgggtcatcgtgtcgacctgcgagacgacggaactgaccgcatgcactttcgcatccggcaggaaccgcttgaccagcgcgtccacgccgtggtcgagcgtcgccgagaacagcatacgctgaccgcgtgaatcggtctgctccagcagacgcgtgacgggcggcaggaatcccatgtcggccatctcgtcggcctcgtcgagaatcgtgatctccacagcgtccagagacagcttgccctgacgcagcagatcctcaagacgtcccgggcaagcgacgacgatatcggcgcccgcgcgaagccccgcgacctgacgggcgtagctcacgcctccatacacggtgacggtgctcatgccgtacgcctcggcgagcggctgaatcacctcgtcgatctggttgacgagctcacgggtcggcgcgagcaccaatccgcgcggacgcggcagggacgcctgctcccgcgcggccttctcgtcggacgccttgcgaatctgctcgaattccttcatggccacttcggtgacgctgtgctcgctcaggcgggcgaccagcggaatggcgaatgcgagcgtcttgccggagccggtctgcccacgaccgagcagatcgacgccgttcagcgaatcggcgagcgtgtccgcctgaatcgggaacgcggtgaccttgccgtccatggcgagcacgtgcaccagcggcttgggcacgccgagctcggcgaatgtcggagcggcatcctgctccttgtcatctgcggaagcatcaagggcggcatcgatatcatctatatcaacagtgtccgtatcggtatgcataacggaacgcgcagcggaaccagccgcgaaatcatggtgacgtttcggcacaatagcctttcaacaacgaagccgatcacttacgcggcttctgacggagtgtccaccatatcagcaccccctccccaggatgccgggccggacgcggcgcggcgcggcggtttcgctattaccatgttatcgggccgccgatgacgtgccaatgcgcgccaatgccatatcgactcattgagagaggttcaacgatgaagaaaggactgtccccgacgacggggcgggtcatgctgctgtgctgcgcgatgctgtggggaggcagctatcccatagccaaggtcgcgatgggtgtcgtcacgccgcaatggctgatgggattgcggctggtcggcgcgtcgacgatcatgctgatcctgtttcgcaagcgaatcgtaccgtatctgaacaaatccatcatcatcccgggactggtgaccgggctcacgtattggggcacgatgatcagccagacggtcggcctgacgatgatcgaacccggccgcagcgcattcctgacctcggcgtattgcgtgctggtgccgttcgtctcatggctgctgatgcggcagcgccctgcggcgcgcaacatcgtcgcggccgccctgtgcctgaccggcgtcggcttcgtgtcgctcgggtccgggctgggcgggctcacgattggcaccggcgacctgttgacgctgctgtgtgcggtgatcttttcgttcaatctggtgtgtctgggcaagtggagccgcgtcatcgacccggtggcgctgacgttcgcgcagttcgtgacggctggcgtgtgcttcatagtcggcgcgtcgttcagcgaaccggcgccgaacgcctcatggcttgcgccgggcgtcctcgcatgcctggtctacctgtttctcggcgcgacgatgctggctcagatcatgcagaacgtcgggctcaaggtgaccccgccttcgcaggcgtcgatcatcatgtgcctggagaccgtgttcagcatggtgttttcggtgctgttctatggagagactgtctgtggtgctgcggcgaccggattcgcgctgattttcctggcgatactggtgtcgcagatccggctcaacgggcgtctgctggagcgggtcggccgcaaggcgcggtagtggtgccaccacacggcaccacaccaccgtgcgacaccacaccaccgtgcgacaccacaccaccgtgcgacacgcccggagtgcgtagcacaatcatcgaatcgtcactggccatgcattgccattgcgccgttcttcgattcgcaccttgcgattgtgctacgcattccgggcgtgtcgcatgcaatcgtgcggtcagcggcgacgcagcttggcgagctgatagacctcgtcgaaggccgcggcgacttcgggactgatcacgcacttgccctcctcatgggcgagcgccatgatgtcgtcctgcgtggccatgtcgagattgccggtcggctcgtcggcgaggacaatcgacggaccatagctcagcgcccgcgcgatggcgacgcgctgccggagtcgccgctcgtaccagtcgaaccggaaccacccgaatcagagctgctgccgggagcgccgcccatgtcggcgccgcgaccgaactgctcctcctggctggcggtctgggtctcctgcgcggcgagcagctggttcgacacgggcaccgacgccacggccccgccggccacgccaagcgcgataccgcacatcgtcacgatcagcagctcgattgcgaactgcgccgccaccttgaccttcttcacgccgatgacggtgagtacgccgacctcgtatttgcgttcgcagatgttgaacagattgagcacgaccgcaccgaccgccagtacgacgatgagcagcgtgagggcgaacttggcgaggttgtcgagcggcacgaggctcgattcgtggttctccacgtcggcggactgcacggtgcaggtgtcgtccagtccggccttccggacgtcggagcgaaggtctcgtagtcgtcggcgctgccgagcacgtaggtgtagctcagctgggtcgtggtgttgttgtcatcgtcgttcgcggtggtgtcggcgtccaagccaagcgatttaagcgtggagacggatgtgtatatcgcgttgtcggcgtcctgcgaggtgccgcccatcgggcccatcgcgctggtgttgctggacgtgctgttcttgtagatgccgctgatggtgaacgtgtaggtcgtcgacgtgtcgaacgggttggtgacggtgatctcgtcgccgaccttcaggtcgttgaagtcggcgagcgccttggagatgatgaccttgccgttgtctgactcgccatagccgaacacttcgccggacgacatcgcgaacgtgccgttcgccgcgttggcgatggcggtgtccgacgagaagccggtgagcgtgaagtcgccggaggtcatcatcatgacgctaagagagaacgccacgaccgtcgaatcttgtctggctcttttctgaaaactctctgaacggagaaatgcgatattatgccggatactgtcgcattcgacggcttccgattcgtcacaggtaggttttcatcgccagatcaacggtgagtacgatgccggcgagcacagccgcgatgcgcatgatccgggccgggatcctgcgagtgacgggcgacgctatgtatccgccgatgaagcagccgacgcacagcaggatggccacaggccagtccacgacgccgcgcacgatgaagatgaccgacgcgctgatgttcgcaccggtgccgatcagcgtcttgagcgcattgatctgatggaacggaccgatcttgcctgcgtcgagcaccgcgagcgcgcacgtgccggcaccggcaccgaaatatccgctgtataccgccacgaacgcgacgccgagccatatccaccatgggtccttggacatgggttgcgtcgatgcgggagccgacgcgggcgcgccgtcgctcccctgcccttgcggcgtcgtcagggatctggcctgggccatgacgtccgccgcggcctgccgcgcctgcatgcggccgcgcggattgactgcaatgatcagcgagctgaacaggatcagcggcggaacggcgaattcgaagatcttcgggtcgaggctgagcagcagcgcagcgccggcgacgcctcccaccgcgccgatgcttacgtaggtgatggaacgcagccgctgcccgcgcagctccttgcgggcgcccagcacgccaccgatgccggtgccgatcacgccgacggtattgctcgcgttggcgaggaccggcggaatacccagcgccagcagggccggatacgataccagcgaagacgcgccgaccgcatatcccacgaatccggcaccgatgccggccagcaggatcagcagcatcgtcatcagcgaaaaaccggcaatcaccaccgcatcaactccccgcatatatggacatcccgactcagggagaatacgtcaaagcggcacggcccgcagccgctcgtcaacatagcggacatgaatcacgatgcgcgacgcggtcgcacgatggcccgcgctacagcgatccgagtgctcaggcctccccgcgcggcaccgcgcccgacaaggacgccgcatgattggccacgcgcagttgcccgtaccccagcgcccgcgtgaaatggtgcgcgcacagaccattactttccgcaggattatggcatcccgcgatattgcaggtacgttccgacataacagcccccttccaccgcccccatggatcacggtgatcttctctgaggcttctgatgtttttgtgggttagattgcgggttgtggcagtcggatgtcgagtccgccgcatctgggcatgaccagggcgatgaggttggtgacgcggtggaagccgtaggccatgtggacggtgaccttgatcctgttgctgaacgcctccgactgcccggcggtcagcctgtcggggtccttcaatacggcgtacccggcgccgcgcatgcgcctggccgcctccccgtcgccgccgcgcgggcgaccgccgtcacggcggcggtcattgcttcgtcgcgatcaccgacgtcgcggctgtcgcggcgaaccccttgagtacgtctgccatcacgtcacggtcctcggcgtcaatgccgcggacggcggcgagcatgaccggcaacgactgcgtccaatgcgaggtgagttcgccgaacgtgtcatacccgccggcctcaaggacggcgaacaggttctcgatgaaccggcggcgatgctcgtcatcgaacttcgccatccacccgttgatcgtgcgcgccagataccgggagctcgcggacaggccgccggcgtgcacgaactcgccgcgctcgacctgccagttcaacgcgaaatgctgcatgatgctggcgccgtcgctggagacgatcgtatagccgtcctccacatgctcgcgcatctcgaacagcatgccgacgatcgacgattccggcaccgacttgtcgacgagcggcgcgacccgcgcataaccgggagtatcgaagaagtcggcgtcgaagcccggcccgtcatggcagaacacggcgataaggcgctcctgcaccgcggcaggcgcgtttgcggccgcatacaccgccagattgccgcctttggaatggccgccgaccatgagcgggccgtcccggcgccccgcgatgtcggccagataccgcgcggcggactcctgcgcggcgaccggacgacggaacgccatcgcgaaatcctccttccagccgacgatcgtgctgtcggtgccgcggaacgcgacgtacgatgagccgtcgccgacgtcgaacacgcaggcggagaactgcttggtggtctcggggtcgaactcgtccacgtagccgccgacgcgcagatcccgccagcgcgggctttcgcacatcgcccgcaacaggtcgacattcatcgacggcgaccacaccttgccgaacatgtcgtcatagcattccgcgcgtagcaggtccctgacgctcaccatggcgaggtcgacgtccgtcgcctccgcatcgagtctcggcacgttgacgggcatccgcgcgtatgacagctgcgcgagcgccagactgtcgacctcgttgaacggacggtcggcgaacgtgtcctcgttcgcgcggatgtcatcgacgatgttccccatggcggcctcccgtgatgccatcgattctacgcgctccccttcacacgcgacgccccggccgcctggcacgcgccgacacgcactacaatggtctggtcacgtcaacattacgcatgcatcccatgcacgccaagcggtttcaagcgcgaaggagagcactatgacgcacatcgacaccacctgtgtccagggcggataccagccaggcaacggggagtcccgcactcccccgatcatccaggccacgacgttcaagtacacgtcgagcgagcagatgagccgactgttcgacctgtccgaatccggctacttctacacccgtctgcagaacccgaccaacgacacggtcgcagccaagatctgcgagctcgaaggcggcgcggccgcgatgctcaccagctccggccaggcggcgaacttcttcgccctgttcaacatctgcaacgcgggcgaccatatcgtggcctcgtccgcgatctacggcggcacgttcaacctcatcaacgtgacgatgcgcaagatgggcatcgaatgcacgttcgtgagccccgactgcacgcccgaggagctggacgccgcgttccggccgaacaccaaggccgtgttcggcgagtccatctccaacccggcgctcatcgtgctggacttcgacaagttcaccgccgccgcgcacgaccacggcgtgccgatcatcgtcgacaacacgttccccacgccggtcaactgccgcccgttcgactacggcgtcgacatcgtcacgcacgcgaccaccaagtacatggacggccacggctcctgcgtgggcggcgcgatcgtcgactccggtcgcttcgactggatggcccacgccgacaagttcccgggactgaccacgcccgacgactcgtaccacggcgtcacctacgccaccgacttcggcccggccgcctacatcatcaaggccaccgcgcagctcatgcgcgacttcggttccacgccggcgccgatcaactcgtggatcatgggcatgcacctggagtcgctggccgtgcgcatggaacgccattgcgccaacgcactcgccgtggcgaggttcctcgaagccgacccgcgcatctcatgggtgagctacccggggctggaaggcgaccgcaaccatgcgctggccgccaagtacatgccgaacggcacgtgcggcgtgatctccttcggcgtgcccggcgggcgcgacacggtttcctcgctgctcgaccatttccggatgatctcgatcgccacgcacgtggcggacgcgcgcagctgcacgctctacccggcaggcaccacccaccgccagctcaccgaggagcagcttgaggaggccggcgtcggcatcgacctggtacgcctgagctgcggcatcgaaaacgccgatgacatcatcgccgacctcaggcaggccatggacgccgtgctctgatcaatcatcgatttcgctcagccggctcgcaaaatcattctcggacacgctctcccggatccgcttcgcgagccggcaccagacagcggggaagcccaatcacgtcagccgacgtggcgctcgaagcggtggaagccggtgatgcggtcgatctcggccatgtcgtcggcggggatctggaagccggatgccttgaggttgttctccagctggccgggcttgctcgccccggcgatcacgcagctgatttcaggatgctgcaggatccatgccatcgacaggaccggcaggttcgtgccaagctcgtcggcgacgccacgcagccgctccaccatgtccaagttctcatcgatgagcaggtcgttgatctggtgatccgcctgccatgtggcacgcgacccggccggcagcggctgaaccacagtgatcggatacagaatgacgcttcagcatgccgccgaccaccgtggccgacacggcgccgagcaccgcgccgggcaacagggcgagcgctcccagcaccgtgccggcggtgaagatcgcgatcgccatgatgaacagggtcttcgtggcgaacttgcgcaccatgaacggcgagctggggatcgacaccgacagcaacagcaggtagccggtggtcaggcattgcacgaccgatgcgctgatcgagaattcctccatcagtgtggagtaggcgttgttcagcgacgtttccgacaggatgccgaggaacgtcaggatggccaaagacaccacgacgatgacgagtttcgtggcgaccggctctttgccgccgcggggcaggcgtgcggttgatgtgctcactgtgtcctttccttgatttccggtacccggatgcggccggatgcgcggcggatgggctgcggccgcgggatcgggccggccgtcgtctcggcgagtacgtcgcccagatgcgcgtggtactcctcgacgtaggttcggcgcaggtcgagttcccgcgccgtgagcgtgagtgtgacggcacggcggtcggaggggtcggcgtgcttgtcgagcagtccgatggaagtcatgtcgttgaccagtttggtgacgctcggcgtggtgacgccgaggaacgcgcttacatcgcattcccgtgcggtgccgaccgactgcccgttgggttcgttgagtagatgacaccgttctcagcacagagcggtatgatgcacgatccggcacgtcaccccgtaaagcccggcatacagggtacatacaccaggcaaaacacgcccggcagaatggtcataccggctcgataccatatctgccatacttactcaccatcaaacatcacaggagatctcatgaccacgctagccattgatatcggaggaaccaaaatcgccgcagccgtatgcgatgaaaacgatgccatcacacatcgctggcgcgttcccacaccgatggacgccgacgccatcaaccaccacatcgccaacatctaccatgaggccgtcgccgccggccacgacgacatccaggccatcggcatctccgcggccggcaacgtcggcgcggaccgccgcaccctcaccttcgccgcgaacatccccgcgtggatcaactacgacctgtccgagcacatcggcgcgctcatcgaccatgccgtgccggtcgtcgtcgagaacgacgccaactgcgccggctggggcgaatacgtgcacggtgcgggccagggcagctcgaacatggtcgcgctgaccgtaggtaccggactgggcggagcaatcgtcatcgacggacggctgtaccgcggatcgttcggcatggccgcggaactcggacacctgccgatggtgccggacggcgacacctgcggatgcgggcttcgcggctgcgcggaacgctacacgtctggaagcgcgctggaacggttcgccaagtccgccgtgcgccgacgcccgcaggacgccgaacgcctgatggagttgtgcggcggcgacgtcgacaagctcgaaggcccgatggtctcgcaggccgcacaggagggcgacgtgctcggcctgtacgccttcggcaaaatcggcgaatggctcggccgcgcgatggccgccaccgccgcggtgctcgacccggacgtcttcgtgatcggcggtggcgtagtggcggtcggcgacatcctgctggagccggcgcgatacaactaccagcggttcctggagggcagcgcataccgtggccacgcgagcatcgtcgccgccaccgccgggcaggacgccggcctgatcggcgccgccaacctggcactgcgctaagacgcgcgatgagagatgacgatcagacgcaatcgcgacgcgtgcaacatcccaacatgaaccgcacgcgggcttacgggttctgatacgtgcacaactcccgcgaaacggcataatgcacgcgttgtccaacgccagacgtgtacaacagtgcatgacaacgatttcatccactgttgtacaccaaccgcaattccagaaacgttggaattccaacaagacacacatctacatgcataggtctcccaaggcgcctcgtgcacaactgccgcattcgcccgatatgcgcacgttgtacacgaggtccccttcgaaaagaccttcgcaacgacctccggaccgaatcacgtccctttcatctccacctctcgcatgaagccgaacgcggtgcctgccgttatgcgagatttgcaccggacacggatcacagatcccgtttaccttgaccgacaacggccgacaccctaagacaatgcacgttcgcggtgggaaatgccacgaaatgtcgaaaacgtgggttcttgccggttcgtggcatgaaatatccgacttgtctcattgcttgaaacaaaggataccgaatactagacaagttagtaattgggcctcccatgcagttctattcgcgtcccggaaaaatcttgcacgatacaacgaggaaattgccgaatcaccagcagcgttcgagcatcgccgtatcctccctcgccacaccctccggcccagccgcatcacagcatgtggtagtattgctgtcgttcatattgggcggcattccgatatgccaggaaagccgcgttgcaaaggtagtaccgttttgatttctcgatgagcgtcgccgagcggcttcatgagcgaagccgtgtctcggcgtacgcgatcgcaactcacaccaatcacagatccgcaaaccgcatcggcgagattgcgccgatccggtttctgcatccgcgctttatgtgagtttccccccatttcatcgagaacaaggaacccaatgatacctgcactgaccctgacgaacatcgttttcacttatccgggcacatcggagccgctgcttgacggcatcgacgtcactttcgcacgcggatggaccgccgtgctcggcgacaacggcatcggcaagacgacgctggccaagctcgcgatcggccggctctcgccagatgccgggcgcatatcgccgactccgaaccacctgcataccggttactgcccgcagaacaccgacgaaacaccggagaatctggaggacttcgcctgcgactggtcaccgcaagccatggagatacgccgtgaactgggcatcggcgacgactggccttggcggcccggcaccctgtcgggcggcgaggcgaaacgcctgcagatcgcatgtgcgttggcgaccgatcccgacgtgctggtgctggacgagccgacgaaccacgtagaccggccgacccgcgagcgcatcatcgcggcattgcgctcgtatgacggcatcggcatcctcgtctcgcacgacgtggccttgattgacgcggtggcgagcagctgcgcgttgttcgaacgagatcatgtgcgcggtcgtaacatcaccgtggtgcgcgtgcggccgggaaactactccgcggcatccatggatgcgcaacgggagcgggcggcggcggcagacatggcgcgcgacgcccggcgcgaatccacgcgcatcgacgcggtcaaggagcagcgccgacgggcggcgacgagcgagatagccggcgcgcccaaagcgcaccggctcgtgaatccgaaagaccatgacgcgcgcagccgcatcaagaaaagccataaccccagccgactcggccccgcgagcgcccgcatcgacgcacaggtggccgccgcccgggaacgggccgcagccgtcgtcaccgccacgaagcgctatgacggagacatctggatggatgccgaatcaagcaaccgacgggagcttgtgcggctggagccccagatcatcccgtacgcgccgcaatcgccggatggagtcggcgcggcagcgatatcggagacagcgggcctggagataccgatgctgaccgtcggaccgcatgaccggatcggcatcagcgggccgaacggcaccggcaagaccacgctggtccgcacgctgctgcgcacgatcgcgatgcgggagcagtattccggcgtcccgctcccccggctgacgatcacgcagaacacgacggatcaggatgcccgggaggcgatgcgccggctcacggcgttgacgcccaccgaccgcggtgatgtattgtcggcattcgcgcagctcaacgtcgacccaagccgcctcctcgccggcggcaacccgtcgccgggcgaattgcgcaagctgctgctgtgcttgggattgcgagatcacccgcatctgatcgtgatggacgagccgaccaaccatctggatctgcattcgattcaggcgctggcccacgcgctggccggataccccggcgcgctgctgctcgtctctcacgacgagggattcctggagtgcgccgcatccatccgctggacgctgcattcggacggcctcggcggcgcgcaactaacggtcagttgacgccgccatgaccagcgtcttggccttgacccatttgagcaggaagccgacgcatggcagcgccacgccgatggccagcatatagccgacgaccatccattgggcggtgccggatgacacggagaactcgtccaccagaccggcagcgcgatgttcatcgacgtttccgacagcatgcccaggaacgcgccgatgtacagtcccagcatcaccttgtgcggatgcctgaatttcggggattcggcgggaatatcatgtgcggagccgtgttctgcggccgcgtgttcttgcagggttgtttcttttgaagttgtctggatcgcggacaacatgacctctcttgtactcttcccgtccccgtcgagcgagcggcgcgcacggccgggccctgcgtacacgtcgagaagtccctaacgtccggacctgcgacggcaacgaaaaaccgcatgactggcatcgggcgagccgattcgacgaatgtcatgcggttttgaaacagccgtcaccgtagcacgatttgcaaatccgcataagtcgcatccgcgtatcgtgcgcgtatcatgctggtagaggacgcggcgaatcctcgctcgcgccagaccgagcggcgacagggaagggagaccatgcagcatttcacccaggtcatcgacggcatcgacggctcgcgggccgaactcgtcggctatgtgatcgacaacagtccggagatggacccggaccggcgccggccggcgatcctgatcattcccggcggcgggtacgctatcggatccgaccgcgaatccgaaccggtcgcgctgcaattcctcgcggccggatatcaggcgttcgtactgaaatactcctgcgtgccaagccggtacccggtggcgttgctggagatggccgaggcgatgtcgatgattcgcgggcatgccgacgaatggcatgtggatgccgggcgcgtggcggccatcgggttttcggccggtggtcatctcgccgcgaacctgacgacggtttccagcgatgccgagctgcgcgacgccggatatgatccggctgccgtgcgcccggacgcgctgctgttgtgctatccggtaatcacgtctggccggttcgcgcaccgcggcagtttcgacaacctgctgggtgacggcaaagacgatgcgtcgctgctggagctgctgtcgatcgagaagcatgtcgacgcgaccatgccgccggtgttcatctggcacaccatcaccgatcaggccgttcctgtggagaattcactgctgatgatccatgcctgccgtgacgccggcgtcagcgccgaggcgcacctgttcccgcagggcgggcatggactgtcactcgccaccgtggacaccgcacgtgccggttcgccgggcgagggcgacctcaacaacgtcgtgccggccgtgcagatctggccgcggctcgccttcgactggctccgccgcgcgttcgacgcgaggtaaaggctgctgtcggaggttcaccggcccattcgcgcatatcccgcgcctgtgccttggctgtgcgccgtcaccgtgcgtgggttattgcgtcactgtgcgtgggtaccgtcactgtgcgtgccctagcagcgtgacggtaccctcacacggtgacgccgcggaacagcccattggcagcaaccacggcggcaacttggcagtgtcactcaccggcagcttgacgccgcgcgttccgcggctcaggcttggtatggatcttcgcggtgagatggcgcacttcgatcttccataccgtgacgctgcgcacctgctgatcggtgaactcgatatccggcatgcccgcctgctgccccatcagcagccgcagccctttgcggcactcgtccaggtcgtcgatcacgctggccacgccgttgccgatcaccgacttgaacgcctcgccccagttgcacggggtgcggccggcgatgacctcacaatcagtctccatcgagaacgccacatccaacgcgtttcccgcagcccggatcgcgtcgagtttgcggccgatcgacgccgagtggatgtacagggtcaatccggccagttcgtcgccggtgccggcgtccccatcctgctgccattcgtatccgaaattcagcggcacgatcgtaagtccctcggcatccgcatagcccacatgcacgatacggcatgcggcgacgattccctcgatctgttcgcaatcggtcacctcgcgatcggcgcggcgcatcatgcgatgccgccctgcgaccgtgcgctcgtcattgcgtcgcgtcggacgcgcttcatccagtcccgtcatcgccatcgctccttgtgccgccccgggtttgatttgacgatactcccgttccatgacccgtaattgaagatggaatcagccgcagtgcggagaaaaaactgagcagaaaaagaaaaagcgaccccggccggacttgaaccggtgacctccgccgtgacagggcggcgctctaaccaactgagctacggggccgttcgtgccgtcatcgggcacaaaagaatataatacaggattactcgaccacgggcgtgtcgcggccaagcgcccgataaagaccggtcgcacacggcaaccggtcaatgcccggccgggcgagcgcacagtacggccacaaatgcgccttggcaacggctatgaactcccggatgaacgccgtgggccagtagtagccacgcgtatggctgccgaccccatccgccttcagcccgatatgatgcgcgtattcgctggctcggaacacatggtaatcgctggtgaccagcgcgcaacggtaggcgaggccacggcgcccgggaaccgattgcacgccgctgcgcgcatccatgatctccttcgaaaaacgaagattctccatggtcgtggtggaacggtcctccatgagcaccgcgtcggcgggaacatggcggctttccgtcaggtaccgccgcatcgattcggcttcggacaccacttcgtcgctcccctgtccgccggaggcgacgaacacgcccgtcttgccctgcttctcccacaacgccacggccttatcgatgcgcccgcagcagcggggtcggcgcaccgtccggcatgagcccggcaccgtggatgatgatgtagtcatacacacgtttgcgcggcagcaggcggtacagcgtggaatataccagcagagccgcgaacgagaagaagaaccacacaccttccaaagtgaccagcgaggagacggacagcagccatcgcggcgcgtccatgatcaacagcgccggatagagcacgcaccagcccacaatggccgccgccagcagcgccgccaacgacgccaacgtcatgccgaaattcattccggccttccccaccagtcatcgtcttctcgacgatgcgctgagacccgtcactataccgcggaacctgcggccgtaccacttacgccggcggccatccaccaccgtctcttcccccccccgcatgtgcgatgccctataatcgtagatttgtcctattcacacgcctcgggcacactgccgcaacctcatgcgtgtacagtacaggaaggatttccatatggaaccgaattatctcgtgttgctgggaatcgtcatcgtgatcatagggttcgccctcaagctcgatgcgatcctgatcatcatcgtggatgatcatgggcaacgcgttcgccgcgatcaccgtgatgaccgtgggcatcggcgcgccgttcgtgctcgcctatggcgccgacccggcggcgattggcatcctcgcactgacctgcggctactgcggcgcgccattcgtgcacgccgatggcggccaacttcaacatcgtgcccgttgcgatgctcgacatgaaggaccgcatgggcgtgatcaagaagcaggtgctgccggcgatggtgatgatcgtcgtgcagatcgtgtacatgctcatcgcccagtgacaccgtattccatccgtatatttcaagcaaaggagccattatgagcaagatcctggtcaccggattcgatccgttcggcggcgagccggtcaatcccgcattcgaagcggtcaagctgctgcccgaatccatcgcgggcgtgagcgtcgtcaaattggagattccgaccgtgttcacgcgcagcgccatggtggtcgaggaggccatcgaacgcgagaagcccgattacgtgctgtgcatcggtcaggccggaggccgttcggccgtgaccgtggagaaggtcgcgatcaatctggccgaagcccgcatccccgacaacgacggcgagcagccattcgacaccccgctgcgcgaggatggcgacaccgcgtatttcgccacgctgccggtcaaggccatggtcaagcgcatcaacgcgagcggcatcccggcgctcatgtcgtacacggctggcacctacgtgtgcaacagcatcatgtacaacgtgctgtacctgctcgaccgcaggttccccggagtcaagggtggcttcatccacgtgccgtacgcgaccgcgcagggcgtgggcaagccgagcggcacgcccaccatggaaatcgcgacaatggccaaggccatcgaggccgcgatcgaagccgcagtgagcgtcgatgaggatgccaccgacatcatgggcgaaacccactaatcacgcccacccgtcgaaaaccactgacatatcagcccgccgacgagcccgctcatgggttcgtcggcacactgcagatggaccgaatcacttatcgggaagccgaccgtcgggatcgcacacgatccattcgccgctgggatccacgacgaccgtcgggtgaggaaacacccggtcgaacaggttcgcatttattgttcagatgggtcagccttcgtgatcgttgctatttcaacgtttccttggcgtgtccgctgacacaaaagtgtgtcgggaaccaacccggtggttcccgagcgttttgtgtcaagactgtgtcacctgttgtgtcatcaatcagtcggattccattcagatgatcatgcaattcactgcgttcggaacggatgacactagacacatgtcctggcccgttgctccgttgattcacgtcaacaccgtaagcataaatgcatacctatcccattcagccacgggcacagcctactcaacagaccaatccccgaaccaacggcgaaaccgaaacaagcttcaatcaaaatcagaaacctcatcgtttcaccccagaccagaaaccatcgttggcccacccgtgaccatcaccgcctcccttgaacccagagaacggattgacatcgtcacacaagaccagtaaactaggcttgctttctcttagcaataaggaaggctccaagccgccgggggtattcccccggcacttctttttcatccggggaggccggcgatgcgcgagttgagcatcatggtcgacgagtccggcgaatggggcaaactctccaagtactatctcatcacgctcgtgttccatgaccagtcagaaccggtcatgccccacatcgaacgctatgagcaacacctcgcggatgcctcactgccagacattcccttccacgcaggaccattgctcaacgggcacgccgactacgagaccctcagcatggccgaccgcaagcgcctgttcgtcgcgttcttcaccctcgcacggaatctgcccttcacctacgtgacgttcgcacaccgcaaaagcgagttcgacaacgacaaacgtcgtttcgaggctcagctgcggcgagacctggcgaactatctgctgacacacctcgacagattccagtcgtacgacaccatcaagatctattacgacaacggacagcaggtcgttaccaacgcgttgaaggcatccatcggctatgcactctccaaggaagcggtcatctaccgcaaagccgaccctaaagactaccgcctcgaacaagcagccgatctcatgtgcgccatcgaattgaccgcgctgaaattcaaagccggagaaaacaccgaaaccgatcacaaaatgttcggagactggcgctcattcaaacagaactacctcaaagcgttacgccgcaaacaagcaaaataaccgccatctcccgcatcgtttccaacagacgcttgcataaaaacactcagcccgcatacgacgaaagggtgggcatgccatgaaaggacatgcccacccctgatgtcagtggttcggcaaaccggctacgtgtttagcagcggatcctcctcaccgctgtaaaaccggcacccagcacggccagggcgaccagcgcaccggccacgaccgcacgtcaacgccggtcttgtccaacctctgtttcttgccatcgttcttggaatcggccttcttgtcacttgcagacggcttggttgcagccggtttgttgctgtcggactgcttgtcgttgtcgccattgtccggcttgcttggcttcgagggaacggtctccgctttcttcaacccggactgcgcgtcagccaaggccttcacggcagcatccacgtcagcctgggacgcatcctgcttaccggcgacagtcttcacgtcggccagcgccttcgcgaacggagcccaggaatccttggtgtaatccttctcagctagcttggcggcgtcacccacggccgcgttcagcttggacttgtcaaccggagtcggagtgggagaagtgtcgcccacggtcaccggggtccacgcctgcacggtgccgttttcgtcctgaacgctgatcttgtgctcgccgtcaggcaggttggaggggatcagcgcgtcgaagtagtacttgccggtcttctcctccttcttcaccgtcacgaacggggcgccgtccgggccggtcaacgcctgaggggtggaatagatgtacgcgtaccagaacaggctgttcgcatccgccttgcccttcgccacatccttcaggttatcgatgtacacgcgggcggttttgcccggctcgaccttgccaccggcaacctcagccttcacgtcagtcttatcaggcaacgtctcagcaggcttcgcagccgcgacggacttcgtcgtgaaatcggggacgaacttcaacgcgttctcgttgtcctccacccaatggctcaccttggtattggaatccttgtagatgggctgcgcgtacagcgcgacttgccggatatccaccggggtcttcacatgcacgccattacgcagcaattcgttcgacgtgtcctgaacgacttcctgataggggtacgaaggaaaatcagagccctttgcgttgttcgtatacgcggtgttgggagtcaagccaatcaatgggaaatcaaaactgccggaagccttgccattccaggagttcttgttgaaatacctggcgaaccattggccagaggccttgaaagccaccttgctcccatcagtcgataggtcattgtcgttaaagacgcccttgtactccttatcgccatggaagccatagatgctgtcgtacgagcctgcggtcagctcatcatcggaaacgcccgtgctgcaatccatgatatatgggaatccagtacccccgatggtattcgcacttgagttcgccttctctatcggggtgatgtcggtgatacgctgcacctcgatagagaagcacacgtccttgatctcgtccacctgcgcagggtcgatcttgtagtcgaacgacacgttcgccgtctgcgctcccacatccgacaccctcacgttggacaacgtgatcggattgtccttattcgtgacatccgccgcgttcgaggtggcgacgcccccgaacaatgtgcatgcggccacggccaacgccgccatggcctttccgaaacgcctcatgacattccctccccccccgtggactcattctggcggcgtcgggacacgccgcatgcacgcgttcgcgctgttgcgccatgacgatggcgtatgggataatccacaaggtgcttttgcgtggaccggaacggccgtggcgacacggaaacggccgggcggatgacacgaatgactgccgttcgggacacccccgaaaccggttgtgtcattaccggatcagggtccagcaaaacgttggaatttcaacgtttagtgaatggttaggtattatatggctgaattcgtatatcagatgatcaaggctcgcaaggcgtacggcgaccgtgtgatcctcgacgacgtgaccctgagcttcctgccgggcgcgaagatcggcgtggtcggcccgaacggcatgggcaagtcgacgctgctgaagatcatggccggactggagaccgtcagcaatggcgaggcctacatcacaccgggcttcacggtcggcatccttcagcaggagccgccgctggacgacaccaagaccgtgggcgagaacatcaagatggcgttcggaccgatcgccgagaaggtcgcgcgtttcaacgccatcggcgaggagatggccaacccggacgccgatttcgacgcgctgatggacgagatgggcaagctgcagaccgagatcgacgcggccaacggctgggatctcgactcacagctcgaacaggccatggacgcgctgcagtgccccgacatggacaccccggtctccgtgtgctctggtggcgagcgtcgccgtgtggcattgtgcaagctgctgcttgaagcccccgacctgctgctgctcgacgagcccaccaaccacctcgacgctgagtcgattctgtggctggagcagttcctgcaccagtacaagggcgccgtcatcgccgtcacccacgaccgttacttcatggacaacgtggccgaatggatctgcgaggtcgaccgcggccacctgtacccgtacaagggcaactactccacgtacctggagacgaaggcgaagcgtctggagatccagggcgccaaggacgccaagctcgccaagcgcctcaagaacgagctcgaatgggtgcgcagctcgcccaaggcccgtcaggccaagaacaaggcgcgtctggagcgttacgaccagatggagaacgaggcgcgcaacaacaagaagctcgacttctccgagatccagattccggccggcccgcgtctgggctccgtggtgctggaggccgagcacctgcacaaggctttcggcgaccgcgtgctcatcgacgacctgtccttcacgctgccgcgcaacggcatcgtcggcgtgataggtccgaacggcgtcggcaagtccacactgttcaagaccatcgtcggtctggagccgctgacatccggcgagctgaagatcggcgacaccgtgaagatcagctatgtcgaccagaaccgtgaaggcctcgacccgaacaagaacctgtgggaggctgtctccggcggactcgacttcatcgaggtggccggcgtcgaagtgccgacccgcgcctatgtggcgagcttcggattcaagggctccgaccagcagaagctgaccggcgtactctccggcggtgagcgcaaccgactgaacctggccctgaccctgaagcagggcggtaacctgctgctgctcgacgagcccaccaacgatctggacgtcgagacgctggaatcccttgaaaacgcgctgcttggcttccccggctgcgccgtggtcatctcccacgatcgttggttcctcgaccgcatcgccacgcacatcctggcgtgggagggcgatgacgagaacccggccaagtggtactggttcgaaggcaacttccaggcctaccaggagaatcgtgtcgcccgcctcggcgaggacgcggcacgcccgcaccgcctgcacaagaagctgacccgcgtgtgacacttgattaagtcatgaagaagcccccgcaagggggcttctcgcgttttcggcccctcgccaaatatcctcccgctggcgggaggtgacgcgcagcgccggggggggggcgagaccatggcgcataacatatacgaggaggcccctcacggttggtgaggggcctcctgtggctattgatcggtcagaaccgatcagcgtcagcggacgctgcggcgacgaaccgcgacgaccgcaccgccggccagcgcgaacagagccgcgatggtggcgagcaccgccgtgtcggcgccggtggcgctgagcttgccgtcgttcggcttcgtggtcggcttcgtggtcggcttctccgtacccggtttggtcggctcggtcgggccagtcgggccgggcacctcagagtcctcggtgacggtgacggtcacagaggcggacttgccgttcgccgtggtcgcggtcaccttcgccacgcccttcgcgacggcggtcaccttgccggtcttgtcgaccgtcacgaccttgtcatcgctggaggcccacgtcaccgcctggtccgcgtcatccggcgcgaccttcgcggtcagctgcgcggtggtgcccttcttcagcgacagcgcgccattggcaacaccatcgccagaaacggtcacacccgtagcctccggagtctccgtcacctcggggttgtccttcggctgctcgggctcggtgagctcgaccggagtggccttggccgtcgcagccagctcggcgacagccgcccaggtgacgcctgcgctggtttcggtgaggccccatgcgtcgttgatctggaacttgacgtacacgtcaccggacggaatggtattcggcagcgcgatggtctgcagttccttggtgtacgggaactcagccgtggcgacgggttcaccccagttggtgacatcggcaacgctgttggcgtcgctggccgccaccacgtacactgcgacgttcttggccgggccgttcagcttgtcctgacggtacaggtgggtgatggccgcaatcttgttgccctcgccgggcgacgccttgaacgccagccagtgcggaagattggcgctggggttggagtacttgctgtgccagaacgtgtttgcgttcttgtcgaaggcgttgcccacgggagcatgctcgccggtggtctcctgagagctcgccgcgtagtcgcttgcttccacgtccttggtcaggctgccggtcagcgccacgctggtggtgccgagctcttcaccggtcttggtgttggtgagcttgaactgcacggtggcgtcgcccgtcccagtggtgttgaccacgttgaagtaggcgatggcggccttgccggccggaatcgacttgaggctgacgcttccgggcttgatctcccagccttccggcacgaccggggtgacggtgacgtcaccggtgttcgcgttggatgcggccctcaccttgacggtgatcttggacggggaggccgggttcacggtcttggagtccacggtggcggacatgcccatgtggccggtgagcgtgaacagcgcgttgtcgctgaccaggtcagccgggaactgagcgacggtgccagcggcgggacgatgggtctccagatcgatgttctgctcgttgccggtggcgatggcgagacgctgctgcgtcagcgccggggagatggtgtacttgccatccttgtcggcgcggatctgccacttctgcgtgttacgctcattggcggtgttgcgctgatcctgaccgacggacacgtcggcgcagttgcgcagttccggcctcgcgccgacctgggtgacgacatcgagatgcttgcttccggtgaagagcgcaagacactttccggacactgtatccttcatctggtagtagccgtcaggcgtggtgatgagctcccacggacctttggagatcgacttcaactgggggatgtcgtagatgccggcatcgaccggggtgtagtcgtattcgcggatgtccagcgggtagccgatcttgtcgatgtccgccttcatatcgttccacgtcgcccacgggcgggaatcggaccaggtcatctgcgagatgaagcgcatgccgtcgaagatctccttctcgacctcgttctcggtctggaagtatgagctgtcgggccagatggacaccttcgcaccggtcagtttgtcgtagttcttgtcgatctgtcgtccgccgtcaaaggttccgacgttccagttgttgttgtacagtcttgcggcgttgaccttgtacacttgcgccgaacgggaccagtacagggcctgggtcgcgttcatcaacgtgtatccgtcctggacgagctcctgcggcttgcggccggcaccataccagtattcgatgacgatgtccttgttcagggagacgttcttggtgttgacgatgccgtcgttccagatgcgcagctgcttgcccttggccttgacgtatttatctatgtcgttgatgaagccggtgaacgcatcattcggtgtcgcgccggctccgtactgcttttcggcgaacgtcttcaacttgctgtagttgtcgaagctggtgccgatcatgtactcatcggcgcccatgtgccagtatttcgtggtgaatacgccgtcgtattcgtcaatcagcgtcttgtagaacttcacggcctccgggttggagatgtcgagcttgttgggatccttccggcccgagttgtcggcaagctggtactccgggtagttctccagccagacgttcatgtggcccggggagttaatctccggaatcacgtcgatgccgtagctattcgccttcttgacgaacttcttgacgtcgtcgcgcgtgtagtacgaccatgtggcggctttcttggtgttgctctcctcgggcttgagcttcatctcaagcagcacgtagttgaggcgcaggtcggccatgtccgacaggaaacggtcgatccagtcggtggagatgttgatctggcaggcgcacaacgtggcgccgcgctccttgtacttcggcttcgtggcgaccgtgccggcgggcagggtcagctggccctggcgcagcatctgcgagacggaacgggtgccgtagaacacaccgatgtcggtcgcgccgatgacctcaaggcccttcgagccgatggacagcttgaatccctcatcacccagttcggccttcttcgatgcatccaacgtgagcgagatgtctttgcctgtcgctgaaccggtcgcggccttgatgtccacgtcggtgaacttggtcagctcggatgccaggctctgcgcacgcgcggccagtgcatcgctcgacacgacgcgggtgccttcgcccagcgtccatgcgccggtgccgccggtccagccgtccatgctcgggacggtggccgggcgggtgagattcacgggagccgtggcactgtacccggctgcactatcgtcggcggcgctggccgtcatcgcggtgcacatgccaccgaccatcaggccggctacaatggccgcaacggtgcgcacaccgaaacgtctattggagcttttctccattgaaacttcctttattctcttgttgcggttatgacaggagagcttcatcgtctccaatggatgccgagccggcaaagcaagacaaagccgtcacaacatcatcaccgattaaacgtacactgtgttaacaaaattagcaagatgcatgaatgtcgccttgcgctccagtctcttccacgcccgtcgcccatattccacgtcacatcgcgttcatcatcggcttacgctcgttacaaaaccggccgaccgaatttacttggtcacgctacactgctgtgagtaccgaaaccggctgggagccgagcgaaagcatgaacatataaacggaccgtatatatataccgcatgatatacgtcccggcacgtcactggaagggagcggcaatgacgcacgaagacggcacgacaccgttgaatcatctggtaaaggtattgagactgggcgacccttccgaataccgcggacacacctacatcagcggggagagcctgtacttccccaccggacgcgtgtacggcgggcaggtgatcgcgcagtcgctgatcgccgcgtcgaagacggtctcgcccagccggctcccccattcggtgcacgggtatttcatcgcggcgggcgatatacgccaggatttgctgttcgacgtggagaccctgcgggacggccggtcgttctcggcgcgccgggtcaacgtgacacagtccgaagggccgatcctgaccgccatcgcaagcttccaggaacaggggcagtccggagtggagttctccgatacgatgccgcaggacgtgccggcacccgaaacgctcaccagtgccaaagagctgatggaaccatatgccgacaaatcgccgttcgccaagttctatgcgaagaagtcgccgttcgacatccgccacgtcacgccgaccatcatgctcggtgccgacaaggacagcgcggcgcacgactcaggcaaacagctggtgtggatgaaggccgacggcgtggcggacgtgccgcaggtaatgcatcgggcgatgctggcgctcggctgcgatcaggtgatgatggaaccggtgctgcgcagggcggggctgagcatctcgacgcctggcatctcgtacgcgtcgatcgaccattcgatgtggtggtatcgcgacgtggacatcaaccagtggcacctgtacgtgcaggatacgccgaccgccgcgcacgggcgtggactgggcgtggccaaggtgtacacgcaggacggcgagctcgtcgccgcgatggcgcaggaggccatgatccgcgtgccacagcagtgaggccacggacgatgagtgcgggcgggtatcgaggctggggctgagactggttcggtgccgggaattgcggctgcggccggtatcccggttgcggctgataatgaggctgaaccgtcgttggtgtgccattttgaactgccggaccggtctgggcagccgggccagacaccggtacggcattctcgaccttggttccacatttcgcgcagaatttggcgtctgcttcaagtgcactgcccacagtgcatgcaggacttcatgcttttccctctcggatacggcccatcacagaatgtgcgttccgatcagcggaaccgcggattccatgctctctccatggcgatcctattcctgcacctgcgaaacctccgtttatcgcggacgggggtgttcacctattgaaggggcacggagattgccggtgatcagagtgcgggatccgtagtcctgattggcaccggaccaccctcagccgctacgcggcacctcccgccagcgggaaggggcttagtggcgggttttggcggtggcggaggcgatgccgcggcggcgtttggcggccttcatcttggggttctccgggccctccatgggcggcagccggcacagccattcgccgacgataccgatcaccatgtccgccaggcatatcacggcggcgacggcgcattgcgccacggccgtcgcatagtaatccgcctcgatatgatcgagtaccagcagaatctgcccgacataccagccggccagcgcagcgccggtcagccccagcgccttcgacagcataagcgtgtacacggccttggtcgggtcgagcggcttgagtcgggcccgcttctgcggatcggtggtggcgtactgatgcacctgcagcgccatcaccagcacgacaatgcccagcaacaggagcaccacggacacgaaccatggcgcccccaacaacgaaagccccgaggactcactgacctgcacaagcagacagcccgcgatcagaccgagcagcagcgcgacgacatactgccaccatggggtgcgacgtatcttcattccgtactccctacgatccaagtgtcggacagcagtcccacacggtcggcgtcgggtgccatggccagcagatacgacaccgggtcgccgccgagccgcgcctgcgggtccatgtccatccacggtgcgagcaccgaagcatgggtgcgggctgacggccacggcacccggcagtccggctcatcgcagaccgttcccggcatatccaccagatcgaggtcgacatccccgttcaacgactcctcaacggaaccgagcgtggcaatcagcgccttcgcgtccatccggcacgtcatttgcatgacagccgacatggcatccgacccatgcagatggctcacatgatacagcggcgagatgccctcgacctgatcaccgggaatgccctccaatgcgacaatcgccgtgcggaacagggtttcggcctcgttactgcaactgtccatcgagatgacggccgtgtgcatggccggttgaacggtagcggtatcgccgtcgcccggtttccgcgccgaaccgtcgacggttccatcgaattgcggtatgtcggctgcgctgccggacggctgcaccagggcatcgtcggccatgccggtcatccaactgtcgtcgatgcgatgtacgtcctcgcggtcaccggcctcgtgcagcaaatcagcaatctctcccccgtgcgggcccgcgagccgggcggccggatcaagagccagccacggtgccaaaacgaacgcccgctgccacgcacgcggatgcggcaaagtcacattcgggtcctcgctgacgaggccatcgacatcgatgatgtcaagatccagtgtgcgcgacgcccaatgttgttcccgcgtgcgtccatgagcaacttcgatatgctgcaggcggccaagcagactcgccgcgtccagttcggtcgtgacctcgatgacagcgttgagaaaatccggggtaccatccggcatgccccatgcggcggtgcggtacaacggcgatatcccagtcacctgtgtgccttcaaggccgtcgatatccgcgatcgcggaccgcatcgacgccgcgacgtcgcccttgttgccgccgagtgcgatcacggcgtggtgcatgggcgtgacacggccttcatcagctcgaccagttttgccgtccgtattccgtccgctccgccatcgctcgatggtgacgctcacgtcggcgaacggcacggtgatcggagctttgggcttatgcacggtgacggttacgccttggactgcgggatggtcggctatcacggcgtcagcgatgagagccgccagccgctcaatcaagtcgacatgctcgccttcgatgacggatacgatccgtttggcgacgcgcccgtaatcaaccgtgtcatgcaggtcatcgctggaaccggcacgtgacaggtcgagatgcagcacggcatcgacgatgaagggctgcgcgcgctggtgctcgtagtccagcacgccgtgcgtgcccatgccttgaacgccggtgaggcgaatcgtgtccacgattgcatcctttcgtttaggttggtggtgggtgaccaccccagtcagtttcgccgacggccctccggctgagggaggagggttagttttggtattgtcgccagagggagccgattgtcagggcggcgcggctgcggcgcacgtcatgcacgcggaccgcccaggcgccgtgttccgcgcacagggccgacaatgcggcagtggcattgtcacggtcgtccatcgtcggctcgccgatgccggcatcgttcaacgccgccgaaacgaaccgctttcgggaggctccgatcagcaccggatatcccgaccgcttgaacagatccagtccgacgagcagcggcagattatgctcgatgccgggcttggagaatcccagaccggggtcgatgatgacccgctccggggcgacaccggccttgagcaccgcatcgacctgagacatcagctcgtcatacacgtccttgagcacgtcgtgttcgtagtgcgaggtgtcggcgtccggcgcggcgccgcctttcgacccggccagccagccacgccaatgctgtacgatgtacaggcagtcatggtcggccaccacgtgcggcagatctcggtccagtcgtccgccggacacgtcgttgatgatctgcgcgccctcatccagcgcggcctgcgccacggcagagcgtgtggtgtcgatggagacgaccgctccgtgggcgatcagcgccttcgcggcaccggtcacacggtcgagctcgtccttctcgctgacgcgcttggcgccggggcgcgtcgattccgcgccgatgtcgatgatgtcggctcccgcatgcagcatgtcgtcgccgtggtcgcgggccttgcccggatccagccacaggccaccatccgaaaacgagtcctcggtgatgttgagcacacccatcagcagtgtgcagtcggtatcatgcaaccgctgcagttcagtcatgaattctcctatccgtcaatcgccgaaacggcggcgatgccgaccagtcacggcgatgagccggatcagtgcttggccatgatcagactcatcgcctcggcacgggtggccggggtgcgcatcacgccgcggaccgccgatgtgatggttcgcgacgcgggcttgttcacgccccgcatcgccatgcacatgtgctcgcattcggtcacgacgatgacgcccttggcgtccgcgtattccatcagcgcgtccgcgacctgctgggtgatgcgttcctgcacctgcgggcgacgcgcgtacagctccaccagtcgggcgagcttgctcaatccgacgacctgcccgttggacgggatgtagccgacatgcgcgacgccgtggaacggcagcagatgatgctcgcacaccgagaacagctcgatgtcgcgcaccagcaccatttcatcggtctcgaccgggaaacgcttggacagcacctcctgcgggctgcgtccgagccctgagaaaatctcctcgcaggcacgtgcgatacggtcaggcgtctccagcagaccctcgcgatcgggattctcgccgatcgaagtcaggaacagccgtacggccttgcgcacgccctcttcgtcaatcgccatatatcctccagcttccctcaccacttatatagtcgtcatgcccgccgaaccggggcaggcacaccgtttgccgtcaaacggcaaacacccgtgcgcccggcgagcccctttgcgggaccgtcgggcgcacgggcacgaaatcaccgctcccccggcttcatgccgacggaacgtttgagcgactccggaatctccaccggaggcttgtcggaatcgggacggcgctggtcggacagccacaccggacgttccggagccttcctgatgttcgcgaagatcgcggccagttccttctcattcagcgtctccttgacgagcagctggcgaaccagctcatcgagcacatcgcggttgtcgttgatgatgttccatgcctcggtgtgcgcggtctcgacaaggccgagcacctcctcgtcgatgacctcggcggtgcgctcggagtacttgtgcggcgcaagaccatcgaaatcggcgctctggtcgtcggtgtcggcccacttaatggcgccgagcttcgaggagaagccgtattccacgaccatggtgcgggcgatcttcgtcgccttctcgatgtcgttcgacgcgcccgtggtcggatcgtggaacacgacctcctccgcggtgcgtccgcccatcgcgtacgccatctggtcgagcagctcgttgcgcgactgcgagtaacggtcggtggtcggcatgaccgcggtgtagccgagcgcacggccacgcggcagaatcgtcaccttggtcaccggatcggtgttgtgcagtgcggcggcgaccagtgcatggccgccctcgtggtatgcggtgttgcgcagctcattgagggccatgcccttcgactgacgcttcgggccggcttggacgcggtcgatggcctcgtcgatggcacggttgtcgatcagctgggcgccggcacgggcgcacagcagcgcggcctcgttgagcacgttggccagatcggcgccggtgaagcccggcgtgcgcacggcgaccatgtgcagatcgacgtccggcacgaacggcttgcctttggcatgcaccttgaggatggcctcgcggccttcgaggtccggcgcctccaccgacacctgacggtcgaagcggccggggcgcagcaatgccgggtcgagcacgtcggggcgattggtcgcggcgatgatgatcaggttggtgtcgctgtcgaagccatccatctcgacgagcagctggttcagcgtctgctcgcgctcgtcgtgaccaccactcatgccggaaccacgcttgcgtccgacggcgtcgatctcgtcgatgaagatgatggccggggcgtttttcttcgcctcatcgaacaggtcacggacgcgggaggcgccaaggccgacgaacatctcgacgaagtcggagcccgccatcgcatagaacggcacacccgcctcgcctgcgatcgcacgggcgagcagcgtcttgccggttccgggaggaccgtacagcagcacgccgcgcgggatgcgggcgcccagggccttgtacttcgacggatccttgaggaagtccttgatctcctcgacctcctgcacggcggagtcctcgccagccacgtcggagaacttggtggacggcgtctggccttcgagcagcttgccgttgttcttcttgccgcccatgccgaacatgccggacgcgccgcccatgcggctcatcaggaaccagaacacggcgatcatgatgatgaacggcaatatcgagctgatcaggtagctgaccatgctggtctgctgcatgttagaggtccaccccttggaggggtcggccttctcgaccgcctgcacgacctgcgcgccctgcgcgaacgtatagtagaactgcaccttcttgccgtagttgtgcggcttgttcgtgtccggatcggtcttcgtgaagttgctcttcagctcaagctgcaccagctgcttgttgtcgatgatcttggcgtacgcgacgttctcggtcttgagcagggcgaagccgtccttggtgtcgatggtctgcgtgccggcgccggcgaacagctggaagccggcgaccgccatgaccaccagcagcacgccccacagccacggggacttccagaacggctgcgggccgcctgagttgtttcccttctggttgccgttggggtcgttgggcgaattgcgtttgaacggattgccgttgccgcggttgccattgccactcggcggcatctgctgagggccttgaggatagctcatacctgattattctccttgatacacttcgggcttcaacacggcgatggagtcaagattgcggaatcgctcgtcatagtccaggccgaacccgaccacgaactcatcgggaatctcatagccgcgataccgcacgtcgacgtccacttcgcggcgcgacggcttctccagcagcgcgaatatctccaccgacgccgcgccgcggcgcttgagttcctcgacgagccatgccaaggtacgccctgaatcaacgatatcctcgacgataagaatgtgccgaccgcggacatcgcaggacaggtcctgccgtatggcgatcgtcccgctcgattcggtgcccgacccgtagctcgaaagactcatgaaatccatctgcacgggaatgctcagcgcctgcgagaacgcggcgatggtgttcacggcacccttgagcaccgcgaccagcagcaggtcacgcccctgatagtccttgcttacctgcgccgccacctcgtgtatcttgcttgcgatctgagccttggtgatcagctcatggtcgatctcgtcttgaacatcagcgatttgcatggagaccatcttggcacacgcgaatgacgtgtttccgacgaaatgctgaatgaccgctgggaagtgccacggcaccctgaccgtgccactgcgagatcagccggtcgacggcgtcgacgtgacggaacccggcctcgatgccgaccgccgcgagcgcgtgcgcgatcacgcgcaatctgatcgcccgcggctcccgcgccaacgctttcgcgtcgatccgcagcagctcgcagtctccgtcgacgctcccgcacgaatccccggcgaacgtcaccgcgtgcgccgcaaccgattccgcgataccgtcgagatacgacttctcgatggatgcgagttcggcaccgtcacagaacctgctcacgatatcgccgccggcgaacgcgttcagatagggaatcagcgtgtggcggacgcgcgagcgcaacgggaaatcgtccggcaacggttcgtccgcagccatatggtcgccgttggtcgggtcatcccaccatgtgatcccgaggtcctcgcagatgccggtcgtgtccgcgcgggtcagacgcaggaacgggcgggcgaaccgcacgccgtcacgctcgacgatccgcggcatccccgcgagcgaatccagtccggaggaccgcagcacatccatcagcacggtttcggcctggtcgtcgccggtgtgggcgagcagcacgcatgcggccgattcccgtcgggccgtatcggccagcgcacggtatcgcgcgtcgcgggccgcggcctcaacgccgtgaccgtcccccgacacttcgaccggcaccaccgtgaccggggcgagccccagcccgcagcatcgccgtgccgccgactgagccacctcatccgaatgctcctgcagccgatgatcgaccacgacggccccgcatctgatgccccacgacgcgcacacgatgccggccaccgccgccaacgccatcgaatcgcgaccgcccgagcaggccaccagcaccagcggggcatcgggcgcgggggtatgatcgccgtgctcggcgaagcgcggatcctgcctaggtagtcccagatcgaccagcatggatcgcatccggccgatcgcggcacgcatcacagcggtatatggcatgggtcgaaacctttacagcttggccagtttggcggccatcacgttgatcgcctcgatggccgaccactggttctccgggtcgttgacgatcacggcgaacgacagcacgccgcccttgacgcgggacacgttgccggcgagcgaggtcacggcgtcgaggctgccggtcttcacgcggaacaggccgttgtccgggccggtgacgatacggttcctcgccgtgccgaccaggccggggatggacagtccctccgccgccgcggtagcgatgccggcggtgagattgcgctcctgcatctcgatcagcgtggtcacgctgaccttcgatcccggcgtcagaccggagcagtcggccatctgcaggccggacgtgtcgatgccctgctcggcgagcgtgtcggcgacggcctgcgtgtcggtcttgatgctgttgccggcctgacgcttgagcgccgtcagacggccgaatagctgggctagcgtattgtcggaatgcctcagcatgaacgccatgacctcgttaagcggcgccgagctgaccgaggccagcgctgaagtgccgcttggcgccgcgcccgcggtcggcccggacatcacggtgatgccgttgtcggcgagccgcttcgcgaaggtcgtcgccgcgtccagcgcaggctgctgggacagcaccgggtattggctggaatcgtcgggattggccggcttgaccatgtcggtccaggtgcgtccgccgtcgacggccatcgtggagatcgccgtatagtaccggtgctccgcgttgttttccgtgacgccatccggcgtacgatcctgcccgaacagcgaatcgtcgtacagcaggtcgacctgcgtgatgccgcgctgcttcaacgcctcggcggtgcgctgcgccagcgtgcccagcccggcatggccgttgatgtgcgagggatcgctctccccgtccgacagcagcatgtcgccctcaccctgcagcaccacggtcttgcggttgtcgtcgccctggatgagataggtcttggtgtcgagcgtggagcccatgtccagcgtggtcgccgccgcgaacgcggtcagtgtcttcagggtcgatgcgggctggcggggaatcatggcgtcatgctcggctacgatgttgcccttgccgtccgcgatggccagcgagaaggatttgcccacgccctcgctggcggagaactcgtcgaggatggtcttcgcggcctgggcgtcgacgggcatggacgcgtcgacgccggcggcgaccgtgccgcccgtgagcgcgtcctgcgggtcgggaatcgcgacgctgtccactccccgcaacgtcaggatgccaggtgccacgtcatagatgtcagccacgaaataccccgccatcaccgcaacggcgacgacggcggacaccgcgacggtgacggtacgccgcgtcatcggcagatgccgaatcatatgatgtcgggccgcagcctttgatgccacgagcgaactccttagacagacgttacatcatcgccgcaagggcgccgcccgaaccggctcagcgctgcagcgacgcgaacgaatccaacgtctggacgacacggatcgcgcgcgcatccaacagcttaccgccaagccatgaaccgatgaccatggccgccacgccattggcgagaccgaccggcgccatgacccatagccaaccgcccatatcggccacaacgagcacgatcgcgacgagaatcgtcggcagcatcggaatcagacagccgaaaagctgcacgaacgggaacaatccctgggcgacggcacggccctgcggcgtggagaacggcttgtccatcgacggcaccggatacatcagcgagcagttggtgatctccgcgacgccgatgctgctgaacgagacacccaacgccagacagatgaacgtcacgcccaggagcaggccgtcagccgtgcgccaatcgccggtcaacacgaagcaggccagaccgagcaccaccatatatatcacgttgatggacgcgaacacccgcatgcgggaccgacggtcgtcccagccgcgcacgccggccagcacctccatcgtgaaaccgcggccgtcgtatgccaggccgttgccctcggtcatctgcatcatccatccgccccagatcagaccctgccagatcacgatcgtgatgccacgcgactggagcgcgaacaacgccacgaacaggacgggcatcacgaacagcaggatctgacgcgggtcgcggcgcagatacgtcagcagacgggcggacatcgcgccggacgtgctgtccggcatccagccgaacgcgccgatgccgcggaccttcgcggcacgctcgggcgcacccgcggtcacgcggtcatgacgcaggcaccagacacagccgacgaagcacaccacccacgtgacggccaggatcgccagacgcgccacgaacaggagcgggttaccggtcaataggtcgtacggcaactggaacgcggctccgaacggggtccagctcagagcgtcggccacgctcagatccgtcaatgacggaaaatcatacagactgccggaatcggcggggttgtcgatgatgttcggcagctggcacagcacaatgaacacgatcatcgcgatgaggtagaacgcgttcttgccacgtttcgagcgcaccagcgtcgtcgatgccgaaatgaccagcttggccagcgacatcatcgtgatgatggccagcggggcggcgatgagctgcatgacgaccatgcccacactcatccaccggtatgcgagggaccacagcatcagtgccagcgtgccacagatcgcaggcagaccgctcaggccgccgagcagcatgccgagctgcagtttccggtcgggaatgccgtacagcgcgaaccggtgcggagccatggtcgagccgtcgccgacgagcatcaactgaatgaacaggatgatgaagccggcgaacgtcgacccgtacatcaccgcgacgtgcagcaccccgtacatccaccccgcagggatgtgatgacccgccatatcgaatacggggccgccgaggaaccacgcgagagcgccgactcccacaagggcgccgatgccgaatacgatgccgagcacatagccgatggtctgccacgtcgacttgcgcagggtggcaagggtgagcgcccagcgcagacgcaccatggtcaaaacgacttccatcatgactcctcgggcgatgggaacggggcggtgggcgcagacgagtcggcaggggcgacgccgttcgccgcgtatccgccgtcgagccacgacaacttggccgcggcatgccggccgccgaccagctgcaggaaccgctcctcaaggtcctcgccggccgacacctgctctatcgtgcccgccgcgcggacctgtccggcgttgatgacggcgacgtgcgtgcacatcttctccaccagcgacatcacgtgcgaggagatgatgaccgtgccgccggtggacgcgtactcggcgaggatgtccttgaggttcgcgctggacaccgggtcgaccgactcgaacggctcatcaagcaccaggatgcgcgggctgtgaatcatcgcggacgccaggcagatcttcttggtcatgcccgcggaataatcggacaccatcgtgtccgcggcggaaaccagatcgaaggcgttcagcaggtcgccggcgcgactgtgcgccacatcgcgcttcatgccgcgcagcatgcccgaatagatcagcagctgcattccggtgagccggtcgaatatctggtcgggctgcggcatgacgccgatctcacgtttggcggcgttgacgtcctgccacacgtcctgcccgaggatcatcgcggtaccggcgtcgggaaccagcaggccggtcaccatgttgagcgtggtcgtcttgcccgcgccgttcgggccgacgaggccgaaaaacgagccgaccgggatgtcgagggacagtccgttgaccgcaatcttgcggtcgaagcgcttgtacaggccgcgaatggagaccgccgcgcgcgggtcgggcggcggcagtgtcgcaaccgcgggacgggaggggacggatgacgatgccgtacgcgcgggaaaaccgccaatctgcggctgattgtctatactcatgactcaagcatagaccatgcagctgtatagaccaatcatcccgcagatcgatgacgggccggcggcagccagcatcggcccggccggcggagccagacatcgctgccgaacgccggtcgaagcacggcccaaacccgctcagcccttatgcacgattggcttccactgagccttggagaagatggcctggaacgaaatcggcatgtaactgagcatgtagatggggaaactcagcacataggcgaacagctccttgttggtggcgccgatgtggtcgcgttccgcgacgatcgtcaatgcggccagcgccatcatcgtcacgaccgccagcacgatgtcaaaggcccatcccgcaatcgcactgagctggctctgccacgtcacgaatccgaacgccacgaacagcaggcccagtacgatgcggatgacgcccagcaccgtgaacgggcatagcagcagggtgaaatcgacggacgaaaaatcacgctcacgcacggcccgcttgatcagcgccatgccgtaataccggaacacctgcaggaatcccttgctccagcgcagtcgctgacgccagctctgctggaacgtgaccggctgctcgtcgtacagcatggcggtgccgcagtatccgatgcggtcgccgtgcaggatggagtccatcgtgaattccagatcctcggtcagcagatggaatttccatcccctgttgcgccgcatcacctcccgagaaaacatgaatccggtgccgcccacatgacagctggagccgaggatcatgcgcgaattgttcaggaatcgcgactcgcggatgaaccacagggccgaaccggacgacacccagttgtcggccaggttgaccgaattgcggtagctggtcaggatgcggaaaccggactggaaggccttgttcatctcctcgacgtaatgacggtcgagccggttgtcggcgtcgaacacgaaataggcatcgtagtcgtcggccacacccgagtcaatcatggtgctcagcaggtacgacagcgcgtatcccttgccgatcagctccgtgtcgtggcgttcgacgacatggcatcccatctcgcggacgacttcggcggtgcgatcggtacagttgtcggccaccagccagatatcgatcagcttgctcggataggtctggttgtgcagcgagtcgatgaggttgccgatgacgttctcctcgttgcgcgcggagatcaacacggcgtagcgcttgtccatcggcgcgtccgggaagtgcaccggcttggagaacagagacatgatgacgcagatggcctggtagatgatgccgacgccgcccaccaccatcataagcacgtcgattacggtcagcaatgccattagcgccacctgcttcgcggattgtcggtagacccgtcaccacggcgtgggcgggcggtctttgcgggacggtcggctgccggcttcgcggcggtgccggatgattcgctgtcggacagtctatcggaggaggtcttcgcggcgccgggctctgcagagccgtcgctgctaccatcatcgccatgcgcctgtgcggtaccgtcaccgactccgcgcaatttcacggcgttgcccgacttcgccccctcgcgcacgctgcgcgacagcacgtccttcggtatggcaatcgtttcggaatcctcggtctcgttggcctcgtcaaggtcatatatctggtcgcgcagcgcacgtagctcgtcgctgatcggcacatgggcgctcgatcctttggcggcgcgcggcatatggtcgctcatcggcttgatcacgcgctcactgaacgcctcggcgccctccacgaccttggacttcttccccggcaccggatcgctcatcagcggcgactccaccagcgcatagcgcttcgtgtacaccttgaagatggcctgcatgctcgccgtgaccggcagtgcgaggaacgcgcccagagcgccgaacaacgcgcccatcaccagtacggcgaggaacgcgacgcatgggttgaggtccatcgtgcgctgcgagaccttcggcgagagaatcaggttctcgatctgctggtacacgatgatgaacaccagcacaccgaccccgtaccacaggccattcgacccccaggcgaacagcaccggcagcgcgccgccgatatacgtgccgaccgtcggcacgaactgcgacacgatgccgcagaacaacgccagcggcagccaatatggcacgtggataatctccaggaaaacggccgtgcaggtggcgttgatggcggccaggatggagcgggagaacaggaagccggaaatctgctcctgcaccaccgtccagccgagcaggaaacggcgctgcgtgttcggtccgagccactggcacaggctgcggcgcatcttcgggcccgcggccgaaatatagtacgtcaccatcaacacggtcagcagattcaacaggaagctgaacacgcccatcgtggtggtcaacgcctgaccggcgaaatcggtgatccacgacgtctgcacgttcttgaatatctccatgccgaggttctctatcttcggcatgtcgaacgacgtgtactgcttcaccgcgtccacgatctccgtgtatatcgacggaagccccttcaccatggagatcagctgctgcacgaacatgttgccgaacagcgtgagcaaagccatgacgatcacggcgaggccgatcaggctcaccgccgacgcggggccacgcttccagccgtgtcgcaccatcgagaccaccagcggctcgaccgccagcgcgatgaatatcgagatgacgacatccagcacgatggtcgatatcttgccccacgatgtccacacgaaaatcgcggcgaacaccgcgatgaccgtgtacaacagcgcgcgcccccaccaatccggcggtcgacgcgaatcccctttggcggggaacaccgacgccaaatccagtttctgatcatccgtttcactcatgagaccctattgtagccagcgggagtgtacgcacaggtgcttatcctgtaagtatgctcaacgtttcgattatcatccccgcgtggaatgaggaggagcgcatcgccgactgcctgatgaacgccacgcgccagaccgtcgcaccacatgaagtgatcgtcgtcaacaaccgttccacggaccgcacctgcgacatcgtcgaacagttccagcgcgaccatcccgaagctccggtcatcctgctgcagcagaacgaggatcaaggactgatcccgacccgcaacttcggtctgaacgccgcaaccggcgacgtgttgggacgcatcgacgccgactgcatgctcaaacccgactgggtggaggtcgtgtccggcatcttcaccgaggatccggacgccatgggcgcgaccggaccggtggtgtattacgacatgcccgcgaagggtgccgggctcgccggcgacgaccacatccgccggcacacgtaccgggcggacaacgatcaggtgctgctgttcggttcgaacatggcgattcgcgcctcagcatggcacgccatctcgggcgaggtctgccgcgacccggaggacgtgatgcacgaggacatcgacgtgtcgctgcatctgctcaaccatggtttcaagacggtgtactcacagtgcatgatctgcggcatctccgcacggcgcatggacacgtccttcgcgtcgttccaccggtacatgcaacggttcaagaacacattcgccgcacatcccgaccattggcgcgagcaccacaccgagcggcgcctgtatgcgctctacccgtggctgcacatgctgtacccgatttatcagcagcatctggccgcgaaggacatcaacccggccgagaagatctggttcgacgagcagatcaagctcgtcaagagccatttcgacaatcccgagcaggtggacgccgtcgaatgacgttgaatgacgtcggctgacgccagccgacagatgatggtggggttccaacacggtatgtgccggaaccccaccatcatctgttagccgtatccgttgcggattatcgcggctttctcccgctcacggggccggccggcggatggacgcgccgccgcggaccggtcccgtgtcgctctatcacatcagcgaggtgtagatcttcaggatgtcctcttcggtggccttgcgcgggttgcccggcgtgcacacgtcgttgaaggcgtcgtgggcgagcggtgccaagtcggcctcggtggcacccacctcggaaatcgtggtcgggttcttgagatccacggtcagctggtggacggcctgcacggcctcctcgcgcaccttctcaaggtcgccggtgtaggcgtcctcgataccgaacgcgtcggcgatgtcacggtacttttcgccggtgaagtccttgttgtattccatgaccggggccagcaggatgccgttggccacgccgtgggccacgccgagacggccgcccagcgggtgggccatgccgtgcacgaggcccaggccgacgttggagtaggccataccggtgatgtaggaggcgtaggccatctgctcgccggccggcacgtcgccgtcggcggacttggccaagttcttggcaatcatgcggatggtctgcatgctcaggcagtcagacaggctccatgcgcccggggtgatgtagccctcgatggcgtgggtcagggcgtccaggccggtggcgaccttcaggccgcgcggcatcgtgtcggtcaggtcggggtcgacgaatgcgacgatcgggatgtcgtgggggtcgacggccacgaacttgcgcttgttggcggtatcggtgaccacgtagttgatggtggtctcagaggcggtgccggcggtggtgggcacgccgaagatcgggacggacgggttcttggtgtcggccacgccctcaagggacagtacgtcggcgaactccgggttggcggtgatgatgccgatgcccttgcaggtatcctgcggggagccgccgcccaggccgatcaggaagtcggcgccggattcggcgaacttcttgacgccgtcctggatgcattcgaccggcgggttcggcttgacgttgtcgaacacctcatacggcaggccggcctcgtccagcacatcggtgaccttcttgacagttccggtcttcagcaggatcggatcggttacgatgaacgccttggtgaagccatgggacttcgcgaccgccggaatctccttgatggctccacggccaaaatacgcggtctgattgaagatcatgcgatataccatgctggctctcctttgaatgacgcgcgggcgttgcgctcggcgtatctgctatgacaattcctatcgtacctcgaaaactggaaacatgctgggaaggtaacgcaaacacagcagagaacagttgcggtatagcgctgtagcatacaatcgcccccgcggccttacccctacgaaaaatcccatttgtcaccgcgtaagtttcttcatcgcaagtcccacaaagcagtacacgccgtaccacattatgagccgccccgcatcccgccgccctcattcatcccgccaaagtcccatccgcacgggctgaaacgggacatcgctcggactagacactcggacgacacccccatccggccaaaatcccgtttggcgcggcgcggatgggaccacacacggacgacgtggccagaatgctcatgctggggacgatgcaaagaggcgctttcatgcctgcacatcaatcagacgcccggctgcgctccgctcaggaatgatgcacggcactcgtcaccttgatggcggtccatgcgccgcgtacggccagcaatgcaagccatgcggcgaacagcagcgagccgacacgcggcgaaatcagcccggcgatcaacgtgcccaacggcgccgtctgacatttccgcccgcgccgcgcttgctcttgccttcttcaatcatgctcacgggtttactctagcgcgggtaacgccttcaaccagcaccgggtgcaaattacgggttgaaatcgccgttctgggcaattccccgtgccaaatcgccgttctaaggtccaaaaacggcgatttggcacggggaatcacggattgcggcgatttcaacccgtaatttcgggaagagtggggggggggaaagagaccgggaggagggagggcgctgggggcatgcaggaccgagacgcatgctggccctagcccacgcaatcaggtaagacccatgacctgcccgacttctcgaccagatgcaagaaacccgccatcccaatgtttccaaagggtgacgggttttccgtggtggctccgagcggcatcgatccgctgacctagcgattttcagtcgctcgctctaccaactgagctacagagccagtgaacataaaaacccggcgaaaaccgggtcttcacattccagcgaccccggccggacttgaaccggtgacctccgccgtgacagggcggcgctctaaccaactgagctacggggccatatgcttgtttgcaagcaacgagtagatatattacagagttctgggcgatatgcaacttcggcgtgtcgcagcgcccgcagagcctcccaggcaggcccgaacaccaccgaggatgaacctgaatcccagtatttccagcacttcccgcacctaccctatcagcgccgccaacggcatgatcgcaagactggtgaaggcggagtcgccgtaatccttgtagacacaatcgccgttgatgcagtacgacccgttccaggtttccggatgattcaccatgtatacccccaccgcgatcgcaaaaatgatggtgatgataacgatcacgatggcaatcgcactgatgacgatgcccgctatggcgaacgccttgccgcgctcctgcgtgcggttgatctgccgcagggcgatgatcgagagaatcagtccggccgggcagaacacgaacgacaggacgaacccgacaatcgacatcgtgttccatcgatcgttcggcgcatagtacgccggcacgccataggggttcgcgccatacggaggatacggaggatattgcgcagcgccatagggagccccgtactgtggctgctgggcgccataccccggtgctccatagctgccggtctggctgtgctgaggctggccataccctggctggcccgagtacccggcctgaccataatccggccggccatatccggtctgaccatactcaccctgaccatacggcggcacctgaccatccgcggcaccggcacccggagcccacgaaccatcgcccgcctgctcatacccgtcctgcgtcggcacctgcccgtcattaccgtcagtcggcatggcacttggcgtattcgatgacatctcaggactccttcggtcgctatcgttcccgccgccgctcaccgcccggcgctacgcccagtatatcctgtcaacgccttcatctcaacgccaaggcatcacagcgccatccccgacccggcgcaatacgatcggacagaccagggccggccgcaccgccccatccgcagacgaagcgacgcgaaccggccccgtattcggtcgagtcaccattcagacggcggtacgtccggccataagccgaccatcaacgcccagcagcccgaccggccacccagacacccggccacccgttcagccgacctgcttccaggtggcgacgtcgatgtggtgctcggggttggcctgccacgcatcccacgcggacttgacgatgtcctccacgtcgtacttggcgtgccagcccagctcctcgttgatgcgcttcggagagccgatcaggtgcggcggatcgcctgcgcgacgggccatcacggcctcggtgaacggcaggcccgtgaccttcttgacctcgtcgacgatctggcgcacggaggtgccctcgccggtacccacattgaaggcgtcgtacttgcgctcgtcgcggtcaaggtacttcagcgcggcgatgtgagcgtcggccaggtcggagacgtgaatgtagtcgcgcacgcaggtgccgtccggggtcgggtagtcgtcgccgaagatggccggcgccttgcccttcttcaggcggtcgaacagcatcgggatgagattgaggatcgcggggtcctccagctccaccggaccgcatccggccacgttgaagtagcgcagcgcgcagaagcggatgccgaacggctgctcgcaggcgcgggccatccactcgccgaacagcttggtctggccgtaggggttgatcggcagcatagggacgacgtcctcgggcaccacgtcgaccggcggcacgccgtaggtggcggcggaggacgagaagacgagcttcttggcgttcttggactgggtcatgccggtgagcacgttgagcatgccgttgatgttctgctggtagtaccacagcggcttctcgacggattcgccgacctgcttgcgcgcggcgaagtggatgacggaatcgacgtcttcggcgtcgaggatctcggcgaggcggtcgccggcgcccggcgcggcgatatccatgccatacaaccgcgcgccttcgatgcgggcgggctttccgtagctcagatcgtcgacgacgacaacgcgttcgccggcttgatggagcgcatggacgacgtgggcaccgatgtatccgcacccaccggtaacgagaactgtcatgtctgtcctttcgtgaccgcgagcataaccatcggcatccgcgacgactgaccataaccaatggttaacgatagttgaatgtttgattatgctcgcttttgttatttttccgaacagttttatcgtagcacatgaacataagagaacaaaatatgttcattgaaacattaccgacattccagaccatgcacagatgacaggcgagacggcccatcgaagcacggcggccacgaaggaggtcaacggccccgggataatatggcacataccacgaccgaccagaaacgaggaaaccgtgccagagcagatcgaacagccgactttcaccccgcgtccggtactgtcgttcgtgcggcgatccggccgtctggacgcgcggctgcaacgcgcgtgggacaactacgccgacacgtatctgctggacatcaacgccggcgaggggtcgctggacgtgcgcgacgacttcacgctcgaccgcgacaccatcgccgtgacctggggcaacgccaatccgctgatcgtcgaaatcggcaccggacaaggcgagaacatcgtcgccgccgcggccgcgcaccccgacgtcaacttcctcgcgctggaggtgtacgaccccggcgtcgcgcacacgctgctgctcgccggcaagcagcggctcggcaaccttcgcatcgcgcaggtgaacgcgcccgaactactcgccgcgaccgcccccggctccatcgccgaggtctggacgttcttccccgacccttggccgaagatgaagcaccacaagcgccgcatcgtgcagccgcagctcgcgcagtccatccacggcgcgctagccgacggcggggcgtggcgcatcgcgaccgacatcgaagactacgccctgcacgtgcacgaggtgatggacgggcgcacggacttccgcaacgccggcacgatcgccgtcagcctgcccaccgggcacgtcggcaagggcaacgccgagctcgccgacgacatgccgcacgccgatttcaccgaatcggagcgattcgacgaccgggtgctcaccaatttcgaaaagaagggactcgccgcgggccgggtcatccacgacctcacctatatcgcggtgtgacgccgattacggcgtgtcgcggatttgcattatcgccgcagctcacgtaatgtatatcgagttgtcagcccccatcgtctaacggttaggacaccagactttcaatctgacaacgagagttcgactctctctgggggtactcaccagctccgggttccacgaggtatcgtggcccggagccttttgtttccaacggtttcaggccatcagcttggccttcagttgctcgaacaggaaatcgcgcggtggtcgctgccaccagagatgcacctaagtccctctctcccagcatctgacgcatgagcgtgtcgtccagcagggacgtcacgggcacgccgaagtagtcggccagcgccgcgatgtcggggatactccacgtgttcttgttcttcatcttcgcgctgactccgcccctggtcatcttcagaggctccgtgagcgccgtctgggacaggccgtgcgcggtgagggacgcggagcagaggacaaattgtcccggaatcttggacagaaagtcacccaatagacaagtgataaacaattctcccctcatccccttcggggatgctcccctcaacgccgaatcagcctccacgaagccggtcgctgatccgaagcccgaacccgttccggcgaccatggccgatcgcaaggccgtccactcgctgctgatcgacaggccgtacggcgagatcgtcgcgacgatggactgggcgtgccgatctacagggcgacgctgctgcgcacctcgttgtgtcaggaacacatcgaaggcgtcatctcgcaggaggcgtgcccggtatgcgcatacgacaaacgcaaccacgccacccacggcgtcgccggacggcgcaaggcgaaagccggtgcgccggtaaaggcggtgcggccatgagcggggacgggcagcatcttgaggcgtggaagaaggccggcgaatgccgcgacttcccgcaaccatggtccgactacctgtggtcgctggagttcgagcaccgtcccggcgacgcgaagccgttcatcaggcgctttgcggctgtttgcttatcttggtcgaaaatatcctacccaaaaagcgctcttctcttactcccccaacaacccaacggagaaaccccacccacgagaacagcaatagcgcccaattatctcaccttctatttccttcaaataagaacggcgggctcctttgacaaggagcccgccataatccttttatcagccgccaccaacgcggtatgcggtgcagatatcgggatcattgacttcggaaatcatgaacgcttcatcctgcatgattcacctcagctcgaccctactgcttgtcggcttcctcggaggcgagtcgtccttcgagctgttcgacgatgtgggcgtgcatgttctcgtcgatcttgacggtcaggaggaagacgacgaggctggcgacgatgccggcgagcggcaggtagtaggcgcaggtcttgaacgtgcggatgttcgcggcggtcatgtcggcggcggtggcgttgccgaccattccggcggcgacgaccacgaagcccacgatgccgttggacagggcgccggcgatcttgtcgagcatcgggcgcacggagagggtgacggcctcgttgcgcttgccggtcttgagctggccgtattcgatggagtcggtcatgctcaggatggcggtcatctggatggtctgcgcgggaaggtagaagaggacgagcgcgacgatgacgacgggcaggttcatgggcgcgatgatgaacagcgtgtagccggcgatcatgagcgccatgccggcggtgtacagccagcggcgcgggatgcgacggttgagcaccgggtagaggggcgtggtgcccagtccggtgatgaccgggatgatgccggcgatggagaagctgtccggagctccgagcacgtacttgaactgataaaaaagcacgccggtggtggcgacgttggccacggagtacagcaggtagctgagggccacccacaggagctggtcgttctgggcgatggccttgaacgcctcgatggggttgccgttggcctcggccttggcgcgcagcccgccttggttctctcgggtgccgaacgcgacgctccacgcggtgagcaagccgagcacggcgatgatgatggcgaacgccgcccagccggtgcggccctgctcccactggccggtgaacttccaggtgaaccagctgacgacgggcacgacgatgacggtgacgccgttgtagccgatggatccggtgaacgcgccgagcgcggtgtacgtgctgcgctcgtgcgagtcggaggagatcgcggggatcatgccccagtaggagatgtcgcgcagcgagtagatcacgtcgagcaggatgaacacgatgacgaacaggaccatgaacacgccggtgttcacgtccacgaggccgaacaggccggtgaacaccatgatcagcaggatgccgggcacgatgccgccgatgaactgccacgggcggaaccggccccagcgggtgttcgtgttgtccacgaggttgccgagcagcgggtcgaggaagatctccgcgatgcggatgaccaccacgagtccggtgatcaccgcgatgaggcgtttggcaagcgtcttgtccacgtcgatgaacagcgcggtggtcacgaacgtgatgaagaacgtgctcatcgtgttgtagaacgcggcctggcccaggttaccgaatgcgtatgcgatcttctgacccgtgttccgcgtgggctgcggccttccggtcgtttccgtgtgttgtgtggtggatccgctcatggtgtggtggcctccttgcgacctgtaaagaatccgtgcgcgtgaaccgctccgatcccgcaaagcgtgagtatagaactttcttgaaaaagtagaaaactataccgcgtgtcgcaaatcatgccaacgttctgcaaccggcactccgtgtggatgagtaaggtttgaagcctgcttgatgtgcttgaatcttaagaaatccacgtattttgcatgttgcaggccttgtgccgcgaaatgctggaaagaatttgcgcaatcaagtaacaatatttatccttgttgtacaaggaacctgattcaacgaggttccctcactgcggcggcaacgacgcgacgcaatccgatgcgaaagcgaggacatcatgaacacaaccgacgatcagcggaagaacggcgatccgatcgtctccccgtccataccgacgacggcatggctcgccgacccgcgcgtgtacgcggttcaccggctcgacgcccattccgatcatgcgtgctggtctcgctccccagtcgacggcgagggcacggatctcgggcagagccttgacggcgaatggcgggtccgcgtcgagacggcgccgacgggtcgtttccccgatgggacgagcgacgggccggactggatcagcgacgtgtcgcctctgttcgccgcgcccggattcgacgattcgtcgttctcacgcgtgcaggtgccctcgcatctggagactgcggggctgcttgccccgcagtacgtgaacgtgcagtacccatgggacggacatgaggacccgaaggccccggccatccccgagcatggccatgtggcggtctaccggcgcgagttcgacgcggatggcgaagtcgcccaggccgtgcgcgaagggcgcccggtgacgcttaccttccagggcgcggccacagccatctacgtgtggctcaacggctcgttcgttggctacgccgaggactccttcacgcccagcgagttcgacgtgacggacgcgatcaaggtggacggcaacgtgctggcggtcgcctgctacgagtattcgagcgcgagctggttggaggctcaggacttctggcgtctgcacggcctgttccgctccgtcgaactcaacgcgaggcccgccgcccacgtcgccgacctccatgccgacgccgactgggatctcgccacatcaaggggttcgctctcgctggatgtgctgatcgacggtgccgcgaacgccgcgacggccgacttcgcactgtgggacaagaacggcaccatcgtctggcgcaccgccacgaaagcggacggaacgctgcacgccgaggccgagatcgatgacgcggcgccatggagcgccgaacgccccgacctgtacgagctgtccgtcactctgctcgacgcggacggcaaggtcctggagaccgctcgcactcgcatcggcttccggcatgtggccatcgaggacggcatcctcaagctcaacggcaagcgcctcgtgttccgcggcgtcaaccgccacgagttcgactgccggcgcggccgggccatcaccgaagaggacatgctgtgggacatccgcttcatgaagcgccacaacatcaacgcggtgcgcacctcgcactatccgaaccagtcacgctggtacgagctgtgcgacgaatacggcatctacctgatcgacgagaccaatctggagacccatggcagctggaacagccccggcgacatccccgtgggaacctccgtccccggtgacgacgaggcctggctgggcgcgtgcatcgaccggctggacagcatgatcctgcgcgaccgcaaccatcccagcgtgctcgtctggtcgctgggcaacgaatcctacgcgggcgaagtcctcaaggccatgagcgcgcacgcgcaccaacttgatccgggtcgtcccgtccactacgaaggtgtcaactggaaccatgcctacgacgggatcagcgacttcgaaagccgtatgtacgccaagccggccgagatccaagactggctcgaacacggcgacgaacggggcgaggcgagcaagccgttcgtcagctgtgagtacatgcatgccatgggcaactcgtgcggcggtctgagcgagttcatcgacctcgaacggtacgagcgctactccggcgggttcatctgggattacatcgaccaggggctcgtccagcgtctgcccgacaggagcgaacgcctcagcgtcggcggagaatggggcgaccgtccaaccgactacgaattcgtgggcaacggcatcgtgttcgccgaccgcacgcccagccccaaggcgcaggaggtcaagcagctgtattcgccggtcaagctcgcccccgacgggcacggcgtgaccatcgagaaccgcaacctgttcgccggcaccgacggctacgtgttcgccgcacggctcctcgaagacgggcatgagatctggcatgccgactaccgtttcgacgtggccgcaggagatacccaacaccatgacatcgccttcccggacatcgacgcggacggggatacgcgcgaagtcacctacgaggtcgatctcctgctcgccgaagccaccgcatgggcgccggccggctacgagctcgcgttcggccaactcaccggcacgctcaaccccgaacaggacatcaccgagaccagccatgacgacgacggccgcgcaactcgcacgctcagccgatggaacgccggcatccgccgcgacgacgaggaaatcctcctgtcacgcactcagggaggcatcgtctcctggaagcgcgacgaccgggaaatggtcatccgtcgccccgaactcgtcacgttccgcccattgaccgacaacgatcgcggtaaccattccggtttcgaccgtgccgcatggttcgcggccggccgatacgccatcgtaaccgaaacgaaaatccacgaaagcgatgacggtctcgtagcggaataccagtacgagcttgccgatccgaaccacacgcccgtgtccgtcacttaccatgtcaactccgatatgcgtatgcaactgaccgtcgaatatcccgggaacgccactgacatggccagtctgcccgcgttcggcatcgaatgggagctgcccggcgaatacgatcgtctgcgctactacggccccggccccgaggagacctaccgcgaccgtaagcagggcggcaagctcggcatctgggacgccaccgcgaaggcgagcatggcgccgtatctcatggtgcaggaaaccggcagccacgaggacgtccgctggctcgaagccaccgacatccaaggccacggattgcgcgtcacccaacgcggcgaccgtcacttcacggccagcctgctgccctggaacacctacatgatcgaggccgcgcgccgccacgaggacctgcccgaaccgcgccacaactacctgcgcctgctcgcggcccagatgggcgtcggcggagacgactcctggggagcccccgtccacacggtctaccagctgcccgccggcaggccgctcaccctcgacgtgaacctcgaactcatctgaccggcaacgggcggcggcatgcaccaccatgccgccgccggccccgcctacgacgcggcgatcgaggccacgggcgctgcggccgcggacggcaccggcgaggaggcgttcgagcacgcctgccgcacggtcggcatcaacccgccaggtcctctcgctcatcaccaacccgatggacgtgatctgccgcaacatccgcaccgtgcgcgagaagatggcaacccgccccgacatcctcggctgccacctcgaaggcccgttcctcgccctcaagtgcaagggcgcgcacgagccgaactgcctcaaggacccggtgcccgaactcgtggaccgcatgctcgacacctcgggcaccgacctcgccgccggcaagctcggctgcatccgccagatcaccatctcgaccccaccgactggaccgcccaacacgtctggtgcgccggccgccaggtggagtaaactccttccagcaaaatcgacgccggtgccgcccgtcttcgagacgacgtcttacgcctgaggaacgaagcttgcgcgcggcaccagttcggtcgtcagcaggatgtgacgatgcacccgccgctcatgcttcaacccatcgatcagggtggagaacgccatgcgggccaactccctttgatcgatcgcatacgaactcagcggcggcgacgtgtaccgggcgatcgactggttgttcacactcaccacggccaactcgtcgggaacctccacgcgcagtgcgttcaacgcctgcaacgcccccaccgcaagcacgtcggcagccacgatcaaaccatcgggcatgctgccggcctcacgatggtcagccaccaactgctccgcgagacgatagccgttctccacggtgaacgtgccggacgaatacaccaatccgtccgtttccaatcccagatgcgcggcccactgacggaacgacagctcgcgaatgtcctcgggatagtcatgcatgcccatgatgctgcccacgccgccgagaaacgcgatacgactgcggcccgccgcgatcatcgcgtccaaggcgtccagcatcgtctgcgacagatcgggacgcacggagtcgaacaggcgcggcgccggattcgtgtcgatgcacacgccatgcgggagcaccatatgcagggcgcgcaggtccgcttcgggaaacaccgtggctcccacggtgatgaacccatcaaactccgttgcgcgttccgtcaactcgtgtatggaccggatgaacgtgagctggtccaattccaacgactccgcacgctccgcaagaaccttccgcagatcggcgaagtacgcgtcctgcaattcctccccggacggaggcgcatccaacaccgcgatcgcgggacggaacacgttgcgataccccatctcctcgcacacgcgcaacacacgccgacgcgtctcctccttgatggagaacgacgggtcgttcaacaagcgtgacaccgtgctctgcgacaccccggcccgtcccgcgacttccttgagcgtggccatgacatcctccccgcaaactttagtaaagggttttactacagcataacccgggaaggcggggttagcggcattggcggcgtggaagtttacccatgactggtagactgcacatgtcccggcaataggggcaatgcataggggggtggcgggcatgtgcagcaacattcccgtcaccttacgattcttatagcgtgtcaggtaaaagaattatgattctcaatccaccttccggccgcgcctgcagactcaaatggccaatgatggggactgtctctcgaagtgtgtaactggccttaactggccggtcgtgtggccggtcggaaaggctggtggacgatgtctgctgggacaatggggaaacatgacaccgacgaagaagccggacgcggaaaaacgcaacgccgagcgggaggcagcgctcacattcgtgcgcatggccaaggaaaaggactggacctgacagggcccgacggactgctcagacagttcaccagaagcgtgccggagacggccctggacgaggagatgaccgagcacctgggccgcgccaagcacaagaaatccaaggacggcagggccgcgaacacgcgcaacggcaccaccgccaagaccgtggtcaccgattcggtaggcccggtcaggatcgaggtgccgcgagaccgcgctggcgcacggtgtttgtgtcgccgacgttgctgatgttgccgggggtaatagtgatgatggcgttgccggcgcgtgttcgggcgaatccgacgtctggcacaagaccgtcatctgctggctcgtcctggtcgcatacctgtacatccaatgcgagaactatgcgttcgccgccctgccgctcctcgtgttcgccgcctcgaaggcgaggcgcgagcgctgattcctcgcgggccgacgcatcgacgcgccccgagatggaccaaaatccagaataaccgacattcgccgctgttccgtctttcgcccaaggcgtatatctacccgtatcttgaggtgcatcatgtattgtcgcggctaactaaccggcgaaacgcggcatgtttcgcattttgggcgaaaagcccaagtcccacaggaggtattgatgacgttcgttgcacggtcggtgcgctatgtgctcagaaaacgagtgcgaaccatagtactcctcatagtattgactatcataacagcgagcatgctatccacgatcgcggtttctcgggcagctcaacaggccgccggacgaatcgagaaggaagcggtcggcgggttcgtgctggccagcaacctgcagggcagcatgctcacgcctcgcggaggtggcatggtacgtcccgccgacgtgcgcaggatcgcccaactgcccggggtcgattcgtatatggtccgtcagaacgccaccgccgatctcgtgggggcgaatgtggcgaaggtccccggcggcgatgattacgatgcgaccaaggagcagcagttcggcaacgccgccaacgtcataggcacgaatgattcgtcgaaactcaacgtgttcacgtcgcgcacgctcggcatggccgaaggacggcatctgaaggcctccgacaagtacacgtcgatgatccatgaggatctcgccaaagccaacgggctcaaagtcggagacacgctcacgctcaaggccaacgcctacgacgccgacaacgaatcacattcgacggcgaccgtcaagaccaccatcgtgggtatattcaagggcgacagcgccagaaaggtatccagccgagcggaactgaccgccaacaccatctacaccgatctggataccacacgcgatctgtaccagtacaaggacggcaaggaaatataccaggacgccaccttcgtgctgtccaagggcgttgacgtggagaagaccatggacgccgcaaagaaactcccggtggattggaacaattatcagatcacacgcaacgaccagtattcgtcgagcatgctgcatgccgcccgcggcgtgcgctccatgatgcgcggcgccctgatcggcgtgaccgtctcggccgtgctcgtgctcagtctcatgctgctgctgtggatgaacgaccgccgtcaggagatgggcatactggtgtcccttggcgtcggcaagccctccctggtcgcccaatacctcaccgagatggtgctgatcggtctgccgtcccttgccctcggctggctgtgcgcgcagggaatggcccaatggctcggcaccacggcgctccattccgtgaacgcctccgcggcgaaggagctgagcagcatgggacaggtcggcggcgaccttgaatccagcatgtcggtgcgcaccctggattcgctcacggtgtcggtcgacgggaccgccatgctgtacgtggcgctcggattgttggcggtgatgctggtgtgcgtcgcggtggcgtgcataccgatgctgcgcaaatcgccgcgagacctgtcggagattcgatgatgagcatgaatgtgtggaagcgtgccacgttggcgatcgtacgcaagccggtacgcagcggcatcatcggtctgctgatgctgatggtcttcacgagcctggtggcgcaggtcggagtctcgacggccctgcgtaccatgtccgacagcatcggcgcgggcatgggcatagggtttaccgtcagcgccggcgagaatcccatcagcgccgaggaggcgagccggttctcgcgtatccccggtgtgacgaagaccgcctatgcgacgaagaccttggcgcaggtggatggcgcacgcccggtcgtgccccggcagggtccccgattggactccgatctggccatgcaggtcagcgtgctgggcaccaccgattcctcattgtccgaggaattccagagcggcctgtaccgtctggagcagggccgccatatctcgggcgacggcgacaatgtgctggtccaccgcgacttcgcgctgcagaacggcctatcggtcggctcgacattccgtctccggcaggaggggcgcaacgccacggtgcgtgtggccgggatcttctccggcaacgtgcaggcccaaagccccttgccctcggacacttccgagaacctcatctattcgggtaggcgagtgacctccgctctgaccggaaacgaccagatcggcatgatccgatgcctgtcggataatccgcaggacctgtccgcggcggtcagtcaggccaagaccatggccggcggcaagtacgacgtcaccgacgattcggcccggctctccggcgtcctgcaatccgtgcagacggtgcgtgatctggtgcgcatggtgctgctgtccgtctgcctcgcggacgtactggtgctggcgatggcgctggtcttctggattcgctcacgcatccatgagataggcacgcttctggccctcggcatcggcaagatgcggatcgtcgcacaactcgccatcgaaaccggactcatggcggtggtcgccgccctgtgttcgctgggcaccggcgccatgctgtcgggatacgtgtcttcccgactgttgcgcgattcgggcgtcgcgccgttggaatcgttgcacgtggaggccttgccgcctgagcagacgctgctcatcctgctgctcggatgcgcggtcatcgccgtggcccttgccgtgtcatgcgccgccgtgctgtccaaatccccgaaatccattctttcctctatgcgttaggagtcaccaattatgtctaactgtctgcaactggaccatgtcgattacgcctacggcgcggcgaagatccttgttctttcggatgtcagcgcggatttcgaatccgggaagatgtatgcgatcaccggcccgtccggcgccggcaagagcacgctgctgtcgctgctggccggcctggacgccccctcccggggagtggtccgcttcgaaggggaggacatcgccacatcgggctatgcgaagcaccgtcgagagcacgtgtccctggtgttccaggaccataacctgatcgactacctcacccccgaagagaacctgcggctggtcagcaccaaggccgatatgaagatcctcgaggaactgggtttgagccgtgaggaatccaagcgcaacatcatgcacctgtcgggcggccagcgtcaacgggtggcggtcggccgcgcgctggtcgccccgggccgcgcgatcctcgcggacgagccgacgggcagcctcgacccgaagatgaccgacgaggtgattcatctgctgcagcacgccgcccatcagctcggcaaatgcgtgatcgtggtgacgcattccaagcgcgtcgccgactccgccgatgtcgtgctgcgtctcaggagcaagaaactggcccgggtgtgacccacctgggccgggcggcacccatacaccgcttcggcatttcggcaccccggcgacccactcgcgttgccggggtgccgtattcgttctgcgacataatgtcgtgataatggaaccatgccagtgatgaatgatgaagtgcccggcgagggcgatttcaacgcggggcgtcgacgtggcgagttcgacgatatcacttggcggattctagcggtggttgcaacaccaaaaaaacaccaggtgttgcaaccaccgctagaatccgcctttctggtgttccccgaatccaagcaaccacccaagctcgtcgaatacttcggcaaggcgctcccctatgccatgaccggcctgctggtggtatacgcgctacgcaacacgccgatcctgaccggttcgcacggcattccggaactcatcgcctgtgccgtcatcacattgctgcatctgtggaagcgcaacatgctgctttcgaccgccggcggcaccgcggtgtatatgctgctgatacagctggtgttctaggagcatgcctggcggcgagtcccgtcaaggatggatgaggaacccgccgcccaacctgccgcagaaccgtcactcgaacggatacttcagcccccacttcgcccgcagctcgtccatgagctcgacgatgcgcagcgaatcggcgtgcggcatctcggcgcactcctcgcgcccgtcgagaatcgcgttcgccgcggcggcgacctgatactcgtaaccggtcagctgcgccggcacatcgtaatgctccgccacggcatggtcggcgccgtacacgtcgatcgcttcgatgttgttgatgttgcggcacaccacgtaccccttgtcgccccaaatgcagcccgcacggtcggagcaggcgagcatcgacgacgtggacaccgccatcacgccattggcgtaatacagcgtggtcgagttctgcgcgtccacgccggtcggggcgtatggcgtcatcgacgtctcgacgcgctcgaccggcacctcgccgtggccgcccatcaccatgtcgatgaaattgagcgggtacacgccgacgtcgagcagcgcccctccagccatcgcgggatcgctcatacgcgccttgcccgacaccggatagcacaggttcgccgaaatcgaccgcagctcgccgatcgcgccggaggccacgatccggtcgacgatggcccgcgacggcatgtagcgcgtccagatagcctccgtgcacagcagaccgctgccgtcggccgcatcgagcagcgcacgggcctgcgcggcgttcgcggtgaacgacttttcgaccaggatgttcttgccggccttcaggcaggcgatgccctgctcggcgtgcaggctgtgcggcgtggcgatatacaccagatccacgtccgggtcggccagcagctcgtcatacgagccatacgacaccgggaacccgtattcggccgcgaacgccgcggccctgcccccgtcacgcgcggcgaccgcatacggcgctaccagaccggcataccgcgggtccgccgccatcgccaccagtgttcgcgccatcgaatgcgcgatgcgcccggcgcccagaatcgccacgttgacgcgcaacccctgcgcttcggcctcggcacgtctgccgttcagtctgctcatcattcctcctcgaatgttccgatacatgttccgatggaatacgcgggtatccccgcgaaaccggctgtcaatgcaccagaataatccggtgaacggtatccgccccggctcgccgcggcgcaatccggcgaatatgacgcgacgcgcccggcagtcatgccaaggtgcgtcgcgtttcatcgcatctcgtcgcgtgccgccgcgctccggcggccggccgcatgccgtcatccgatctgccgttccacccaatcgacgatgtacggcgcgacctcctgaatctggccgatggccacctgaaactcgcggggcccgccataccagggatccaccaggtcgatggagtcctcgcggccggccgccggcttgggcagattcgggtcgaaactgcggtacatgtgcacttcggcgcgcttggaggacggcagctgccgcagcagcgcgcgcatatgcgcggccgtcatcggcaggaacaggtcggtttcctcgatctcctcgcgcgtgacgcgatgggcgaaatgatgcgtggggatctcatacccgtcggctcgcagcacgcgcacggcgcgcgggtcgataggatggccgtactcctcgtcgctcacgccgctggacaggacgcgcacgcggtcctcccctatcccacgcgactcgaattcggcgcgaaggatgatctctgccatgggcgaacggcagatgttgcccgtgcacacggtcatcacggtgtatgggtgctgctgtgtcatgatgactcctgatggtttccgatgggcgcctgtgcgtaaggcgcccggtgaacttgcgcgcgcggcgattcagccgatcttgcgataggtgacgaagcggtaccgcttgattccgctgtcgtccttctgcgttctcttccaatgtccggggtcggcgacttcccacaggccggcgtcgaccagagcgtccatatcgggcgcatacgtgtctgcgtccactgaggtctggatcttcgtcacgaacgccttgctggcgaaaggcagcgcctcctggaagacctgcgctccaccgatcacccagatctcgctgcggtcaagcccgtcgtcgggaatggcctcctgccgcgcgatgtcgagcgccgcatccagatcggtgacgaccgtggcacccagcgccagatactggggattgtgcgataccacgatgttgtcacgattgggcagcggacggtacttcacgttcagtgactcccatgtcctgcgtcccatgatcaccgggtgagagacggtgagctccttgaaacgtttcatatcctccggcagatgccaaggcatgccgccgtcgaacccgatggcaccgggacggccgtctttgtcgtcagcttcggcccaaatcaggttcactgaaaacgtcttgggaaagtcatcaccccaatcatcggctttctcctgcccggcgaacccgggctccggttcgtgatagccgttgcggctactatcatgctccatttcattcactccttgaatcggactgggacaatagtgtaacggtcggttcagaccgcaaccggcgccttgatggtgggatggtgccggtagtcgacgatcgtaaaatcctcgtactggtagtcgaacagcgaatcggccttgcggatctcgatcttcggatacgggtacggctcgcgcgacagctgctccagcacctggtcgacgtgattgtcgtagacatggcagtcgccgccggtccagacgaattcgcccggttccaagccggcctgctgcgcgatcatcatcgtcagcagcgaatacgaggcgatgttgaacggcaccccgatgaacatgtcgcacgaacgctggtacagctggcagctgagccgcccgtcggccacgtagaactggaacagggcgtggcagggcggcagcgccatattctcgacctcggccgggttccatgcgctgaccaccatgcgacgggagtcggggtggttgcggatcaggtcgaggacattgccgatctggtcgatggtgcgattcgggtcttcgggggtcggcgcgggccagctgcgccactgcacaccgtacacgggaccgaggtcgccgttctcgtccgcccagtcatcccagatgtgcacgttgtgctcctgcagccagcgcacgttgctgctgcccttgaggaaccacagcagctcgtatgccagtcccttgaagaacacggtcttggtggtgagcagcgggaatccttctgacaggtcgaaacgcatctgctgcccgaacagggatatcgttcccgtgccggtgcgatcggacttgagcgtgccttcgagcatgatccggcgcaccaaatcctcgtacggcgtggggacgtcactgtgaggacgggcggggatacgggtgcggatatctgcgagttgttccggtgtcaaagccatgccccccagtgtaacgacagcggctaacagcccgacgcgagtggcggagacgacggacggcagcgtgcgatggctgcggtagcgtcacgctgcgcgggtaccgtcactgtgtgcgccctcgcacacagtgacgataccacaaaccccagtgtttccagcggtttccaagaaaccgtcacgccgcgaacccgcacagcgtgacggtacccgcacagcgtgacgccgaaacatggcatgcacaggcgattcggagatgaaacgccggacgagacgggggtagacgccccaaaccagacccagatcagaccaaagtacccatcgagcagacgtgctcgggccggaggggcgtccagccgaacgcgcatcacgacccatggcgaacgattgtggtctacattagaggtatgtgtgacgcggcaggcgcgtcatgacgactacacgaggagatacgcatgggcaagcgactttgggtcgagcgcaacaaggatggttcatgggatgcgttcagcgatgacggcgctcacatcaagttcggcaagggccgcggagtgttcacccccggagacctgatgaagatcgcgctggcgggctgtgccgcgctgtccagccagttcgccatcgagcacacactcggtgacggcaagggcgcgaggatcgtcgtggacggcacatatgacgccgacagcgatgcctacatcaacttcaacgagcaggtcgtagtggatgccactgacgcgaagctgagcgaagaggatgcggacaagctcaaggagcgtgtcacgcgccacatcgaaaagggctgcaccgtcaagcacacctatgtgcaggagacgccggtgcgcatggacgtgacggttcgccgctgaggcatcgcggggctcctcccctgtcatataacggcacggaggagttcatgctaccgcgtccgcggcacgagcgccggcacaacaacatcgtggccccgccgggcatcgagtccggcggggccactgcatgtatcagagccgaatcaggccttgtgctcggggtcgatgaccgaatcgatctgctcgacgacctccggctgcgcggccggcaccggcagctcctcgacaccgccgatggactccaagggcttcggctcgacatcggccggcgagctcggaaccgtgtcaagacgggattccgcggcttcgacgtacttgcggggtacgacatacaccgggccgacggcgtgctggatcagtccctggctggtggagcccagcagcaggccggtgaacccgccgcggccgcgggagccgacgacgaccacgtcatggtcatagctggccttggtcagcgcctgcacggcgttgcccggcaccacggtgcgggtgatcttcagatcggggtaggactcctcgatcggcttgatacgcacctcaagatcctccatgaaggattccatcacggccttgtcgccgtccgagccctgcaccttcggcgcggcggagatcacgtcgagttcggcaccccacatgttggcgaacgaggcggcgatgtccagcgccttcagaccccacttcgactcgtcggagccgaccgccaccttggtgatcgtgttgttcaggtgcatcaggttgccgtcgtcgtcggtatagggcacgacgacgatcgggcagtacgcgtacgcgggcagcgacgagctggtggtgccgagcaggcgctcggccagtccgcccttgccgcgattgccgatgacgatgagattgtagttgcgcgacagctcgacgaacacggatgccgggtcaccggtgacgatcagcgtcgccgcctcgacgccctgctcatcggcgatggccttggccttggaaagaatctcctgtgcgtcgctgtgcgccgcgttgtcatcacccatcgcggtgtacgtggcgtcgaacgacactgcggcgtagctgggcagcgaatacgcgcatacgatctgcagcgtcaatcccgcatgcttggcaaaattggcggcccaccacgtggccttgtaactggcatgagaaccgtccaccccaaccagaatcgccttttcgttgatcatggcaacctccttaaggtaacaccgatgcagcggcgcatcgggtcatagttcctagaataccgcgtacgcgtcaggatgcgggatgaacatcagtcattttgccgattgagaacaatgccacattcctggcatcggtgtgtcataacgcgcggcagcgcagcggaagcgggcacggcatcgtcgccgcatcacctgtcgaaaaagcacgacagcgccccaatggaggcgctgtgcagtgcgaaatatcgttcgaagactcttcgaccggaagcaaccggcttagatgattcgataatactcgaaggaagcgtatacgggcacgatggacacgctcttgccggggcgcggcgcgtgaatcatcagaccgttgccgacgtagatgcccacatggccggatctccacatcaggtcgcccggctggggatcgctgaccgtcgtgccgtgagcctgagcccacacacgctgctgatagtcgatacgcggcaggctgatgccgaacttggagtacacgtactgcgtgaagcccgagcagtcgaatcccgacggcgtggtgccgccgtacacatagggcacgccctggaactgggaggcgtaggcgaccacgccggcaccattggcgctgaccggggcatcgaccgcaccgtcattggagacggacgatgagctggtgctgctggtcgcggccgatgcgcgggaacggctgacctccgccgtctgcaggcgggaggcttcggcggcggccttctcggcggccttgcgctcctcttcggccttcttggcctcttcctcggcctttttctcggccgtggacttggtttcgggcacgttcagggattccacaccgccccagctttcgctgtcatcggagctgaccgatacgatctccttgagcagatccttacgcgcggtgttcatcttcgggaacgagcgagaagaggtaatcgccttcctgctcgcattatcggaaccggccaaggcgacaggcaccgataccgtgaacaacgccaccgcagctgctgcggcggtgatagtcgaaataatcttcttgcaaatcatcatcgaggcatgattgtagcacacaggcatgcatcttcgcctgagaacattcacgataggaaatcacgccatatcggcgacatcacgggaaaaccggcaatcttcacacgaccggcgcgacactcccgggagaataatagagatgaatctcactggcggggaccgaagacccgccgaaaatcagtagtggatgtactggaagtcgttcacgttggaaagggtgcgggatgccggcttgccgttcagcgaagcgccgcactccgagacggtgaccgtgccgtcagcgttgatgctctccacgatggcgacatggccatacacggaactcgcgccttcctggcccgcgcggaacaccatgacgtcgcccttgtggcgaggcgtgttgtccacccagtagccgtgcgcacgagcggagttcgcccagtcctgaccattgccgaaatatgatccgacgggcaggccgagctgatggcgacgcaggtacgcccaccacgtgcactggctgaacgcataggcgagaccactgtcgcccgtggcatggttcgggttgaatccttcgggcagcttgccggcatcctggtcgaccagcaccgcgacctgcgggttgttcgccagggagcgggacagctggctcacgtcgatggcggagttcttgtcgttcagctcccagttgccgttattggtggtctgcacgaatttggcgtcggcgatcgtgttgctcgtcttcgcgtcggccgcgccgctcgtggccgcggctgcggtctggtcggaggcgatggggccgagctcggtacgggattcggaacgcgagaccgtcgaaccggtcacgcgggccagctgagtggtcgtcgtggcgggatcgtcggccagcagacgagagttggacgactgctggatattggaaaaggccaaggcggtggccgcagtgccgaccagagccgcaagggatgcggatgacatcatgtacgacttgcgctgcgcggccttcgcggtctcgcggatggcccggcgggtcatcggggcgacctcgttcagcttggctgcaaaaacggggtcgatggcgagcgccacggcatcgccgttggccgcctgcacggcacgcacggccctggccgtgtgggaaccccgggaggagcggaataacgccgaggggctggtgcgctgaacggaatccttattggccttatgcgcagcatgcctcatactttttgctcctttaatatcatcgcgatgcggccttccgaagacgccgcacgttcatcacggttgaccagcttaccgcggggtgcggccatcggcaacccgaccgcatccgacacatgaacgccgactcctatcaatccgcatcattggctagtgttgagcatatggacaatatcgtgaacatcccgtcctcaatgaagcccgaagacggacgattcggctccggccccagcaagatccgccccgagcaggtggacgcgctcgaacgcggcggcaagacgctcctcggcacctcacaccggcagacgccggtgaaatccctggtcgcctccatccgtgaaggactcggctcgttcttctccctgcccgacggatatgagatcgcgctcggcaacggcggcgcaagcgccttctgggacatcgcctgcgcgtcgctcatcgccggcaaggccgcattcggcacatacggctcattcagcacgaagttcgccaagtcggcgcagagcgcgcccttcctcgacgaccccgtcatcttcgcgggagagccgggcacctatcggctccccgagcgcaccgacggcgtggacacctacgcgtgggcgcacaacgagacctccaccggcgtgtcggcaccggtgcggcgcgtggaaggcagcgacgagcagaacgcgatcgtcgtggtcgatggcaccagcgctgccggcgcgttgccggtggatgtcagccagaccgacgcgtactacttctccccgcagaaggcgttcggctccgacggcggcctgtggatcgcggtgctgtcgccgcgcgccatcacacgtgcgcagcaggtcgagggcgaagccaagctcgaaggctcccgccgttgggttccgccattcctctcgctgacctccgcgctcgacaacgcacgcaaggatcagaccctgaacacgccgtcggtcgccacgctaatcatgctggagaaccaggtgcgctggctcaacgagaatggcggcatggcctggtccacggcacgttgcgcgcagtccgccgcgctgctgtacgagtgggcggagcgcagcgaatacgcccggccgttcgtcgccgacccgggctcgcgctccaatgcggtcgtcaccgtcgacctggatgacgcggtcagcgccaaacaggtcatcgccgcgctgcgcgagaacggcatcgtagacacgtccggataccgcaagctcgggcgcaaccagctgcgcatcggcgtgttcccctcggtggagccgtcggacgtggccgcgctcaccgcatgcatcgattacgtcgtcgagcacctgtgacggacgcggcagcaagagccgcccgatcatcaaggactgaacgctcgggcgggtgccggtgtatgtaccgccacccgcccgattcatcccatgcgctaaggtatataggtatgaaattcgcagccatcatcaatcctgaagtacgcaagccggcaccgaaacctgtgcgcgtcgacctgcgcaagacgttcctcatcggctgcgtgctgtggtcggtcgcgctgatcgtcagcgcgatactgctcgcgtgcgggctggatgtgctgcaattgctcatcatgtgcgcggccggactggtcatcggcgtcatgatgctggtatgggagcatttcgaccgctgggattaccggcgtctcggcaactgagccgtatcagtcccccaccggcagcgacagcgtgaacgtgctgccctgcccgggagcgctccacaccgtcacatcgccgtgatgggcgagcgccgcatgcttgacgatcgccaatcccagaccgatgccgtcggccgtgcgctcgttctggttggaaccgcggtagaaccgttcgaagatacggggcagatcggccttcggcacgccctcgccatgatcgatgacacgcaccacggcgttcttcccgtccggagacagggcgacggagacgccgaccgccccgcctgggtgtgaatacacgatcgcattctccaccatcttgcgcacggccatgcgaatctgatcggcctccccgtgaatcatcacggggctcttgccgccgacccgcacctgcaccccggcatcccgcgcagcgccggcaagatcatccacggccccggaaacctgcgagaacaggtcgcaacggttcgcctccgaagccgtcaccggctcctgagccttaatcagcatcagcaggtcagagatcatgcggtcgagccgcacgcaggaatgccgcacctgccgcgcgtggttcgccagctgctcgtggctcacgtccgcgctctccaacgaatcggccagccgctccagcgcgcgggtcggttgcagcagctgttcggagacgttcgatatgaacgagtctcgaatctgagcgaaccggatcgactcgctgacatcgttgatcagcacgagcaccagatggtcgccgatgcgtcccaccgtcaccttcagccagttcggccgagacgaggcctctgcggtcaggccgtcatcggcagccgcggcaccgaatccgttcatcgtcatgaactgctccggcgtctgagtctccaggtcgaacgagcaccgggaaccgtccttcatcaccttgtgcaccgcgtcaagcaacgtaggttcgatcagcgtgtcatcacgcaccaagccgagtctataggccgcaggattggcacggaccacctcgtcctgatcgtccaccacgaccgacgccagcgagagcatcgacagcaccagctgggtggagtcatccagatcatcggccggctcgtcatcctcctgacggcggcgcgcgccgcgacgccgagactgcaacgacggcaagcggtcattgctgcgcagcgcgttcatgatgacgggctgcagccggtccgcgatgaaaaagccgattcccgccaatgcggccagcgccaatagcgcgaaaactacaaaaatccataccgacggctgaaactgaggcatggttccattgtctcacaccgagaggcgacatgcggcgaacgtgaattccgggtgaactagccaatgaattttgagacaatttcaagaacctgaccgccaagcgctaggcaaacacaacttatgcggcttacacttgatagaggttccatcaagagcaactacatagcatgaaaggctacaacaatgcgcgttatttttgacgaggagctcaaggccgttgccgatgacctcgatcgcatggtgcaagacgtgcgcaaggccatcaacggggccggagacgccttgctgaagcaggatatcgaagccgcccagagcgtcatcgacggcgacatcgagatcgatgccctcgaatccagcgtcatcgaccagtgcatccgtctgctcgccaagcagaacccggtggcgaccgacctgcgagtcgtcgtatcgacgctgcggctcgccgcgaccttcgagcgcatgggcgatttggcgaagcacatcgccgaagctgcacgccgcatctaccccgaaccggcgctgccggccgaggccacggagctgttcaccgagatgcagcagttcctgtcgatgaccgccgaccgcatcgtcgtcatgctgcaggaccgcgacgccaaaaccgccgaggagatcatcctcgacgacgacaagctcgacgcgctgcaccacaagaccttcgacctggctctgtccgacaagtggaccggcagccgtcagcagctgatcgacgtcgtgctgctcggccgcttcatggagcgtctcggcgaccacgccgtgtcagcctcccgccgcgtcgtgtacatcgtgtccggcttcgatccgagcaaggagccatcgcgcgacgaggacggcgccgtcgagtgacgacgaccgcggcgatgccgtcaccggcattccgccataactgaacttctctccacggagagtcccatgaacggcgagacggccacggctgctcgccgtttttgtatgccccgacgggcggtgcgcggcttggaacccggatcatagactccatcgcgacgtcaccgtgcgtgagttgcgtcaccgcgcgcgccctcgcagcgtggcaccccgcacgagtcacgcttcgctgcgctcccagtcagcggaagcgggaatggtgcgaatcggcgagaagacggacacgaccatgcccgccgtggccagcgcgcacaccacggcggcgatcagcgtgaacccgcccggcacgaaccgcaacacgccgccgaccacgaccggtgccacggcgccgaatacgccgagcagcgtttcgcataccgaggagacgccccctcggcctacatcacacacgtcggctcgtggccggatacgcaaaagggccgctcccatgagggaacggccctatgcatcaggctaatgccgggtcagagaatcacttctggccctgagcggcgacggcggcggcaccggcggcggcggcctccgggtccaggtactcgccacgcggcttgaccggcttgaagttctcgtccagctcgtagagcagcgggatggcggtcgggatgttgaccttggcgatctcgtcctcggacaggttgtcgagcatcttgacgatggcacgcagcgagttgccgtgggcggcgatcagcacggtcttgccggcgcgcagctcaggctcgatggcggactcgaagtagggcttgacacgctcgacgacgttggccaggcactcggcttccggaaccgggtcaccggcgtaacgcgggtcgtggttctgcgcgtactggtcgttcgggtcgatctcgggcggcggggtcgcgtaggagcgacgccacagcatgaacttctcgtcaccgtactcctgacgaatctcggtcttgttcttgccctgcagagcgccgtagtgacgctcgttgagacgccagtcacgctgaaccggaatccacaggcgatcggcggcatccagtgcgatgttggcggtgttgatggcacgacgcagcagggaggtgaagacgatgtccggcaggacgttcttctccttgagcagctcgccaccacgcttggcttcggcttcgccctgctcggtcagcgggacgtccacccatccggtgaactgattggtcttgttccatgcgctctgtccgtgacggagcagtactagtttgtaagtcataactcgcagtctaccgctcagcccggccaaattcgagcctttgtccaccgtttcgccgagcgcttgcgcaggaatactcacaccatcagcgaaatcagcaggatgacggcgaagaacgggggctggaagcaggcgtccgacagcgctttgcggaattccttacggcccgtgctggtcaccatgcgccacggcacgccgatgccggacagcatgaggatgccgccccacggcgtccacagcagcatcaccacccacacgccgatcgcccatgcgacgacgcagcagacgcccagcatcacgcgggcgccacgctcccccatgcgcactgcgagcgtgcgcttgccatgccggcgatcctcgttgatgtcacgcaggttgttcaccatcagtatctggcatgacaacagccccgcgacgaccgcgcacaacacgccgagcacgctgaccgaaccgctcagcgcatactgcgtgccaagcacggcggccaaaccgaagaacaggaacaccgagagttcgccgaatcccgcatatccgtacggatgcttgcctccggtgtagaaccagccggccagcaggcaaagcacgccgaccagcagcagccaccacgcctgtgacaggacgacggcgacgaggccgcacacgcaggccagcagagcgctcaccacggcggcgacgagcacatgcttcgccggaaccaggccggacgcggtcagccgcatgggcttcttggtcttcttctcactgccgccgcggccctcatcaacaccgcgaatgccatcggaatagtcattggcgtagttcaccgcgatctgcagtaacacgcccacgcacacgcacagcagcgtgacgagccagaaccgagacatcatcgcctgcgcatcggcggtgaccgccgcgcattgcgacgtgtcggaccgggtctgcgcgcagttgagatcgcccacgatcaccggatacgcgcagcatgcgcccaccaccacggaggacagggaggtcgtcaaggttttcgggcgtgcgccggatatccacagtttcacagtcatgcagtccagtgtacgtgcctttcacggattccgtggatatgtcgtcatgatcatccgccgacatcagcacgtcccgctggcggggggggctgtcggcacagcatcgatacataaacaggcggggctccacgcacacacgcgtggagccccgccatatcatttcaatcggtcatcgccgcagtccgcacgcaaggccggcagcggcccgccgcacgtttactgcaacgccagcggcttgaccagcgggaaggtgatggtctcgcgaatcgtggcaccggtcagggcgatgagcagtcggtcgatgcccatgcccatgccgcccgccgggggcatgcccacgccgagggcctccaagaagtcctcgtcgatgtcgcaggcctcctcgtcaccggccagcgcatccttggcctgagccacgaaacgctcgcgctgcacgatcgggtcgttgagctcggagtagccggtggccagctcgaagccgcgcacgtagaggtcccacttctccaccacgccggccttgttgcggtggcccttgaccagcggggaggtctcgaccgggaagtcgcgcacgaaggtcggctcgtatagcttgtcctcgtagaagtgctcccacaggtgctcgacgagcttgccgtggttctcaacgtcgtcacgctccacgccgagcttgtcggcgatctcgcccagatgctccacggaagtgccggggttgtccggcccgccgttcggcacgatctcttcgccgagcgcctcggagagcgaatcatacatgctgatggtcttccagtcgccgccgaaatcgtattcggtgccgtcgagcagcgtgaccttatgggagccgaacacgtccatcgcggtcttctgcacgagctccttgaccagctggccgatggtgtcgtaggtgccgtacgcctggtaggcctcgaccatcgtgaactcgggggcgtgcgtggcgtcgacgccctcgttgcggaagtcgcggttgatctcgaacacgcggtcgatgccgcccacgaggcagcgcttgaggaacagttccggcgcgatgcgcagataaagatccaagtcgaaggcgttcatgtgcgtggtgaacggacgggcggcggcaccgccgtggatagtctgcagcatcggcgtctcgacctcgaggaagtcgtggtcatcgaacgtgcggcgcagcgaggcgacggccttggaccggttgcgcaccatgttgcgcaccttctcatcggcgatcatgccgatgtacggcttgcgcgtgcgcgtgtcgtcgttcaggtccttgtgcagggcgggcagcggctgcagcgccttggacgcgatggcccattcggtggcgaacacagatagctcgccggtcttggacgcgatcacgcggccacgcaggtacaggtggtcgccgaggtccacgagctgcttgaactgcttgagcgagtcagcgccgatctccttcttggagatcatgccctggatcttcgtgccgtcgccggccgacagctgcacgaagcacaggccgccgccgttgcgcagaaacaggacgcgcccggcgatgccgaccacgtcctcggtctcctgaccggcttcaagcttgccgtcatacttggcgcgcacggcctcgatggtgtcggtcacgtcgaggtgcaccgggtagggctgcatgccggcctcaagcatcatcgcgcgcttggcgacgcgcatctgcacctgctcggggtgcgcgagcgggccgaactccttgttggagggatcgacggcctcgtccaaagttgcgccggcgccgatgcggtcgcggatggctgcgtcctgtcgcagcagcatctcggcacgttcgaccgtggtcatgacgggaacagcgggcgccgtctcgtcgtcgttcagggattcgggggtttcttgcgtctgactcataatgtcacagtgtaatgagacggcgatacacgccgagagtccgttgatattccgcggttttcgggatgccacgccacgccggtttggcttgtccgggatttcgttgtattatagcctgcgttgccaaaacgggctgtagcgcagcttggtagcgcgcttcgttcgggacgaagaggccgcgggttcaaatcccgccagcccgacaacatgaaggccagatcgcatcagcggtctggccttcttcttaccggtggcttggcagctcccgcagtctcacactgcgggaccaccacaaccatcagcgacaatcacaacaaacgacacccacgcgcgggcacgcccgcgagatgtgatgaagagggaaccatgaagaaaagcctgcttgccttggcttccggcgcgttcatcctcggcgcggccgaattcgtgatgatgggcatcctgccccagaccgccgaggcgatgcacgtcgatatcccgaccgccggccatttcatttccgcctatgcgatcggcgtgtgcatcggcacgctgattctggtgttcgggcgcaagatcccgccgaagcagctgatcatcatgttcatggcgatcgccttcgtcggcaacgccctgtcggcgttctccgccaatgcgcccatgctgctggctgcccgtttcatctcgggactgccccacggcgcgttcttcggcaccgccacgctgatcgccaagaccgtggccgacaagggcaaggaggcgcaggccgtctccgccatggtcaccggtcagaccgtcgccaacatgatcggcgtgccggccggcacgctgatgtcggagttcctgtcatggaggcttgcgttcatcgtgctcagcgcctgggccgcgatgaccgtgttcctcgcgcttgcctgggttcccgccatcgcgccggtgaaggacgtcggtctggccggccagttcaggttcctccgaaagcctggaccgtggctgattctgggcgcggtgttcaccggcaacgccggcgtgttctgctggtggagctacgtgtcgccgtggctgcagaagaccggcggatacgacagcgacatggtgccgttcctgatgatgctcgccggattcggcatggtggtcggcggcatcatcggcgggcgcatcaccgacaactggcgtcacgcgggaaccgcagccctcgggcaggcgatctccggcgtcggtctgctgctggtgttcctggtgcccggcaaccatgtgagcgccgccatcttcacgttctggatcgcgttcggcctgttcttcatctccgccccacagcagctgctgatgaccgaatccggcaagggcggcggcgagctgctggccggcgcggccgtgcaggtggcgttcaacttcggcaacgcggtcggctcgatggtcggcggcggcatgctgaacttgtcaggcatgaactaccacttcaccgcattgggcggcgtgccgttggcggtcatcgcggtggcgctgctgaccatatactccatgcgtcacgagacgcacaccgacgcgctggagcgtatgcgcgagatcacggtgtgagtttcgcgggatataggctctcaaaactcgcagatacaagtggaatttcgctgaatcaccggtatatctgcgagttttgagagcgggggtttgttatatagctcacatcacacgccgaaaacgtcatcaccaaggcttcctagactggtagaaaccggtttcatggcaaggagatgacatggacgatgatgcactgatggcgaagctgatggccgcgttcgacgatgacgcggcaccggaccaagccggggacgaaccccgaccttccgagcagccttttgacacgcaacggttcctcgccgggctcgacgcgatcttcgacgcgcacgccgccgccaaggcagggccgtacctggagcaggccatgatcgacgcggagaacgccggcgatgacgccgggctgctcaccgtgctgaacgagacgatggggttctaccgctcgcaaggccgacacaaggagaaccagtggatcgtgcaacgggcgctggagctcgcgacccgtatgggcatcacgggcaccgaggcatggacgaccaccctgatcaatgcggccaccgccatgcgggcggccggccagtacgaccagtccgaggatctgtacaagcaggcgcaggcgtccagcgagcgcacgctcgcccccagcgaccggcgactcgccgccctgcacaacaacctgtcgatgctgtacagcgagaccgggaaaacgcatcaggccgaggtggagctgggcgaggccctgcgcatactggaatcgtcgagcccggatgccgaaaccgacctcgacgtggcctcgacgcacacgaatctggcgttgacgctgctcgccgaagacaagctgtccgccgcgagctggcatgcggcgaaggcgttggagatctaccgcaacggtcatcttgagcacagcgcccattacgcttcggcgctggccggctacgcgcaggtgcgttttcaccagcatgattacgggcaggcggtgaacctgtactgccaggccctgcaggtcatcgaggaatgctacggcaaggacactgattattaccgcatcaccgagagcaacctgcggcaggccgaacacgaggcctccgagcatgcccccgcgaatgtttcacaggatgtttcacaggatgcgagcgcaggtgggaatggttccggcacgcccggcgcagcacccgccggcaccccatccgccgccgttccgtccgctaccgcctcacccaccggcacctcacccatatgcggcctcaagctggcacgcgaatgctggaacgcctatggcaaaccgctcatcgccgacaaatacccggaatatcaggggcgcatcgcggcgggactggtgggccacggatcggaatgctacgggttcgatgacgatctctcgcgcgaccatgatttcggcccacgcttctgtctatggctcaccgacgaggattatgcggcgatcggcgagcgccttcaggccgattacgaggcgctcccccaatcgttcatgggatatggcccgcgcgagtccaccgccagggcgcagggtgcaggcaggcgcgacggagtgttccgcatcggcgatttcttcgagtcgatcaccggataccgtcaggcgccaagcaccaacaacccgcacgagtggctgatgctggatgaggcgacgcttgccgccgccaccaacggcgaggtgttcgccgacccgttgggcaagttcctcgacacccggcaggggttcaagaccatgccggaggacgtgcggctggcgctgatatccaagcgtctgggcatgatggcgcaggccgggcaatacaatgtgccgcgcatgctcacgcgcggcgacggtgcggccgcctggctgtcgatcggcgagttcgtgcaggcggcggcatcactggtgttcctgctcaacaatccgatcaccgtgggatacctgccgtattacaagtggcggttcgccgcgcttcggcggctgtcgtcccgcatggcgacgaggctcgccgatgtgtgcgggcagctggagacgctgctgcggctgagctccgccgcctgctatggcggtgccggtttcggcgagggcggcaaggggtcggcaccggtcgccgagaagatatcccagaccatcgagcacgtctgcgccgaggtcgtagccgagctgcgccgagagggactgaccggcagcgacgagacgttcctggagtggcaacggccatatgtcgaggagcacatcgccagcgacgcggcttgtctgcattccctgtgacagggcgtgaccggcacgggcgatgacggcggcaacggcgataacggacaacgggaaagaggcggcggatgagcgaccaactgatcgagcggatagtgcgtcatgaatgggatcagttccagcgcacgaacaacgagggcgggcgggccgcctgccaaggcaattggccggtgttccggcagatgcgcacgagccagttcatgacatggaccgatccgctgctggacagttatctggccgatctggtcgaggccgagcgcgtcgggcgcaatctggtcacggagaagtacggtcgcatgatggagtccacggcaccgcaggatttccatgacaacatcgaaccgtacataccccgattgagcgacgaacgtatcgcgacgcaggagcatgtcatcgcgacgcaggtggcgtgggccgaggacttccgcgcccgctacccgaaactcggccgggccatgcgcgtgctgcgcaccgcggaggacaccgcgcaatccacgtcgttcgaaacatatctgcgcggggagctcggcacctactcggaacgcacgatggccctgtaccggcgtttcgtcgacgatctgctccggaagggtcggaacctgaccgaggagacgatcgcccacaccgtcgccctcgctgggttcgccgatctcgccgaagcggaggccgcacagggctgacgcgggaatcggtgccttgccggcagggccgccggcaaggcaccggtcgatatgtcactcgccgtggggcgttcgtgcgttgcgcgctatctttgccagagaccagatgatggcgatcaggatcagtgccccgccgaccaccgcgcacccgatggcgaacatcacgcggggatccatatcgaaccatgcgagcacgccattggggaacctcactccgaacaggatcgccaccgcgccgaccagcagcatgaacacacccaatgtcagtgtggcggcgctcggccctgtcttgcggatgaccggacgcaccggcacgtcccgcggcacttgcacgtaattggagcccgcgcccggctggacccagggaccggccggagcggcgtatgcaggacccgcatccgggcggttcggtccgtatccgtcatgctctcgcgggggctgcgtgctgtacagcggaatctgctgagatgccggaccaggctgctctgtatcacccgcggcgaaggccgtggcggcatcaggctgttgcgtggcgcccgcgtctgtggatggcgctgcggcaagaggctgccctttgtaaggaacatcgccggccgttgtggctccggccggaacatcgccggttcgccgatcggaagcggcggcgggactcccgaatgcgtcggcggcaggctcggtctcggtctggccgtcatccacgggggccgccgattcgtccgaaaccgccccggccgcaagtggttcggcagacaacttctcggtcgacgcggagtcaaccggcaacgacttggtctcggtctgcggcaccgcgaccttttctaccggcatcgcctctgtctcggcaaccggcagcgtctgtgtcggctcgaccggcaacgcctgcgtcggctcgaccggcaacgcctgcgtgacggcagaagcctgttcggacacgccgccgaccagtgtcggcaaagcctcggtctgctcgaaatccgcaggcatcgcctcggcattcggaagatgccgtgtcatatcgtgatcgtcattcatgatgtgctccttgtatcattcgtccgcagtgctcacagggcgtcatcggatgagcatccgccgctgtcatcgacataacggacggccactttcccctcgatggtgtacggcacgttgatgatcagttcgggcccgccttcgggaatggtgctgtaatcgaggttggatgcgccgccgtcgcacgccgacttctcaccggaacggcccgagaacgtgttgtccaggcgcaggaaatcgtatccccactggtttctagtgatcgtataccggcctccgatagaaccgacgagccgatacccgtcgctgcgcttgccgaacgcaaagctgcatccttgcggcaaagtcagaatcacccgggcccgataagccgagatgcgcaggtccccgaccggacacgtcgattgtctgacctttccgtcgacatccgtcaccttgtgggggctgatgccgggcacgccatctcgcgtcagatctatgctgacgcggtcgtcgccgtaattcgtgccgacgaaccgcacgccctgttgcaatcgggcgatctgctgatcggtgacgccatatttcgtgactccgtgaacattgaccagcgtgccgccttcggactgcatggcatccaccgtatagctgtaagcgacgttgacgcccagtacgcagaccgcgacgaacgcggcggtccaggcgagcggaatcaggcctccggagcggcgtcccatcaggccaagcaccgttatgacagcacccagagccaggcagacgccgccaatccacagcgtgagcacacgggtcatcgattcgatggatgagttgtcgtttgccagcatcagaaccgcactggagacgagcatcagcccgatcatgccgatgacgatggcgaaaccggccggcttgcggcgctcgtatttcggcggaagaggccccgccgatgggcgatacggagacgactggtacggcatgggaggacgtgcgggccgatcggcggtatggggctggccgaagccgtatcccggagcgggctgctggaacggctgacgcaccgacgctccggaggactccgctgcacttcccgcggcttccggcgcggcgggccctgatgagccagccgtgccggcatcggccgcctgcgctcccgtgtccgcaccgtcataggcgtatgacgaggccgaccatccgcaccggtatgagccgttctcagaatcgccggtaccgctggcactgctgacgccgctgcccgacccgtatccgccatgccgccggttggcgttctgcaccagggcccacagcaccagcgccgcgcacagggccgccgcgagaccggcaccggggacggcgaccgccagcatcatcatgattatcacgccaagcatgttccaatcccagcgcccgtcgatcagctcctcgccgaggatacggccatcccgcgcatcgggcagcagcgcccatgcgatggcgtacagcgccaaaccgaatccgcatagcaccacgctcgccagcaccagtgcccgcaccagagtcgggctccatcccacgcgctgcgcgatggcgctgcacacgccggcgatccaccggtcgtcgccgcgctccatcgcgctgccgcggatccacgagaagaaccggtcgctctgccgcttcggcttcggctggggtccgggcgcaggagaaccgtacggatttgaaccgtacgaatccgaaccattcgtgccggggccggcggcgccacccgcgtcataggcatacgttgtatcgttcatgcttccattacagcagcaaccggccgccgcacgcatcgggggacaccctgattgttccctgaaccggggcgttatgccccatgtcgtcttccccggaggcgcacaatggaaccatgacccagccgaacaacccgtaccggcagccgcacgcgccccgtcggacgcaatggcaggcccgccgcgcccagccgccgtccgccgcgcccagcctgccattgatgcgcccgcggaacgggcgcgtcctcgtcggcgtgtgccgtggcgtgagcctacatctgggagcgcccgtatggctggtgcgactcgcgttcgccgcggcctctctcgcgttcggggccggcgtcatcgcatacgtgttcctgtggatgttcatgccggtcggcgatcccgtcgccgccgcgcaggccatgtcggatgcggcctcgacaggtttcgccgagccgctctcccgcggcaatgcggcatacgccggcaccgcgggtgacagtggccgcagcgacgccgacgactcctcggagggactggcggcggctctgcgccgcgccccgaaaccttcactggtggcattggccggtctggtgttcatcgccataagcgtgctgctgtcgtttgccggcggacgggagctgatcgtgccgctggccgtcgccgtcggcggcctcggactggcatggtcgcggttcgacgcggacgagggcaaactgccatcgatgcttggcggcatcgttcttctgttcgtcggctatgcgatcttcgtgttcaccagcacggttccggggtggggcgcgtcccctcgccgcatcatcatcggcgggttcgtactgctggccggcacggctctggcgatcgtgccttgggtgagcacgctcatccgctccctatccaccgagcgcgcactcaaggagcgtgaagaggaacgtgccgacatgaccgcgcacctgcacgatggcgtgctgcagacgctcgccctgatccagctgcacagcgacgacccgcagaccgtgttctcgctcgcccggcagcaggagcgcgaactgcgcgaatggctgtatcaggaacgcaccacatcggaccgttcggtcagcgccgggctgaaggccatcgccgcgcagacggaagacgagcacggcaaaccgatcgaagtggtgaccgtgggcgacgcgaggcccagtgcccagaccgacgcgctgctcgatgccacgcagcaggcgctcatcaacgccgtgacgcatggcggcgagcccatctccgtgtattgcgaggccggcgccgacaaggttgaggtcttcgtgcgcgatcatggcgatgggttcgacgtgaacgcgattcccgagggtcggctcggcatccgcgagtcgatcatcgggcggatccgacgacggggcggtacagtggagatcgtgtcgaggccgcattggggcaccgaggtgcgcatgcacatgccgatctcaggcggacggcaaccgaaccagcggggcgatgccacgaacgccggcgggcagcatggacgaccgccatccggcgcggcatcatacacacgcacgcagaaggaaacatgattcgacaggtgaagcacatgggtcaggcagacagcacaagcatcggaccggcatcaggagcggatgtgaggcaaggggcggccggtgagttcggcagcgtggagttcaacgacgtggagtccggcagagccactgatacggataccactccccgcgaagctgcggcgacgccgattcgcgtggccgtcgtcgacgaccatgagatgttccgcgccggtgtcatcgccacgctgcagccgtacttccacatcgtcgggcaggcagccgacgtggaaggctcgatcgcgatgatcgccgacatcagaccggacgtggtgctgctcgacgtgcacgtacccggcggcgagggaggaggaggcgcggagatcctcgccaaatcgcagccgctctcccccgcttccgcgttcctggcgctgtcggtgtcggattcgccgcaggacgtcggctcggtgattcgtgccggcgcacgcggatacgttaccaaaaccatcaccggcgacgatctgatctcatccatcaagcaggtgcacgaagggtatgcggtgttctcgccgaaactggccggattcgtgctgtccgccttccagggggcgccgatggacggggcaggcggcgcgcggggccgcgacgaggagctggacctgctgtcaggccgcgagcaggaggtcatgcgcctgatcgcccgcggatacacatacaaggaggtcgccgccgaattgttcatctccatcaagaccgtggagacccacatgtcaaacgtgctgcgcaaattgcagctgtccaaccgcactgaactgacccgctgggcagccgaccgccgcatcgtatgaggcaaggcacggccggcgcggcgacatttccatgccgacggtgaaacggacgccgcccacgtagagcgttcttcatacactggtaacgaacacaaccctatcctcgtcggaaggaaacagcatgaccgctgaagcaaacgtcggtgtcgtcggactggccgcaatgggagcgagcctcgcccgcaatctcgcccgtcacggcaacaaggtggcggtgttcaaccgtcactattcgcgtaccgagaaactcatcaccgagcatggcagcgagggcgagttcttccccgcgaagacgatggaggaattcgtggcgtcgctgaagaagccgcgcaccgcgatcatcatggtcaaggcgggcgagccgaccgacgcgatgatcgaccagctggccgatctgatggagccgggcgacatcatcgtcgacgccggcaacgcgcacttccccgatacgatccgccgcgagaaggcgatcagcgcccgcggactgcacttcgtcggctgcggcgtgtccggcggcgaggaaggcgccctgctcgggccctcgatgatgcccggcggcagtgaggagtcctggaagacgctcaagccgatcttcgagtccatcgcggcgaaggccgagggtgagccgtgcgtgacgcatatcggcgagaacggcgctggccatttcgtgaagatggtgcacaacggcatcgaatactccgacatgcagctcatctccgagagctacgacctgatgcgtcgcgcgctcggtatgacgccggccgagatcggcgacgtgttcgaggagtggaacaagaccgagctggagtcctacctgatcgagatcaccgccgacgtgctgcatcaagtcgacaagaagaccggcaagccgctggtcgacgtgatcgtggatcacgcgggcatgaagggcaccggcacgtggaccgtgcagtcggcgcttgatctggccgtgccggtgaccggtatcgccgaggccgtgttcgcgcgaggactgtccgggcaggccgagcttcgcgccgaagcccagaagcaggacttcgagggaccgtccggcgtggtgccgatggccgaggaagacaaggtcgcgttcatcaatgacatccgcgaggcgctgtacgcttcgaagatcgtcgcgtacgcccagggcttcaacgagatcaccgaagccgccaaggtgtatgactggaagatcgatctggctgcggtggcgcgcatctggcgcggtggctgcatcatccgtgcaaagttcctgaaccgcatctccgacgcgttcgagaacggcgaagccaacgtgtctctgctgttcgccccgtacttcaaggacgcgatcgagaccgccgagcgctcgtggcgccgcgtggtctcccgtgcgattacattcggcatcccggtgccggtgttcgcctcctcgctggagtacttcgacggcctgcgctccccgcgcctgcccgccgccctgatccagggccagcgcgactatttcggcgcccacacctaccagcgcaccgacatgcccggcgccttccacacgttgtgggctgagcttggccgtgaggaaatcattgcgtgatttcctcacgaggtgacagccgcgaggagacagtgagcctcgcgaagcgagaccccaatcgtaggggccgaaggcgagcctggtcataagcaaacaccgagcctcaccacaagcccctccctaccgctcgcagatcgaacgcgaaccatacgaatgatggcgcaggctcccctaggggcgtctgcgccatcgtgtttcatcggcacgccattcatatcgtgtggttcccatttttcacacagacgtttttcgcgcacagtaatcgcaaccagacgcatcccaacatcaccaatcaacgcccagtcaccgccggcggtgcatatcctcctgtacaacgcgcgcattgtaggcaaacgcagcagttgtacatacaccttcccgagagacctcgcacgccattcctcatttcgttggaattccaacgtttccaggaacttcgtcggtgtacaacagtgggcgcaatcgttttcaatggctgttgtacagattccgccccgtacaacgcgcgcattatgccatttcgcgggagttgtacacgcatcggcgtcgcaaccctgcgcgcttcttgcgctgcatcccattcgcatgccggaccgcaccccgggcacgcaatgaaccctcgggcggaatgaacgaaattcgcaatacgaccggattgtccagtacgatcgtcgaaccgcatcgccatgattgacagaccggcctcaatctcatgccatgatgaacaccaatcagatcttatttcacgatgggagacgcggcacgaaacggcaagagcatgcatctttgccgtttcgggccacggaatcctcgaattgtctcgttatccgaaataacaggcgtcaaataccgaactatccgatagtcgagacaaacctcacagcttgctggcggcgtcctggtcgatgtaccagatgagttcctcgccgtcggcgaaggagctcggggcctgcggattgcgcggctgggcgaaggcggcggcgaccgcatcggccttgcgctccccggacgcgaacacccacgtgcgccgcgaacgggcgatcatgggaacggtgagcgtcacgcgcagcggcggcggcttcggcgaatcgcgcacgccggcgaccagcacatgcgggtcgtcgatcagcacttcaggccgtccggggaacagcgacgcgaaatgcgcatccgggccgacgccgaacaacgcgatgtccagcgtgggctcctcccccagctgctcgatcagctccttctggtaggcggcggccgcatcggccagcaccgcatcgttctcctcgtcggtggctgcggcgatctgtgcggcatcgcgcgtgtcagcgggcatctcgtggatgttctcctccggcatcagcccgcgctccaccaggatgttcaggaaccgccgcgcctgcttggcgttgcggtcgtcgctgtcctcgggcacgaaccgctcgtcgccccaccagatgtgcacgcgcgaggcgtccaggtcatcggccagcgggtcggtgccgatcgcgcgcagcacgcgattgccgtcggtcccgccggtcagcgctatatccacgcggctgcgccccggttcggcgagcaggttcctgatcgtggtcagcacgcgcacggccacagcttgcgccagaacatcggggttcgggcatgttacggtttttctttgcgacatcagttacagctcctttgtcgttctgattcggtcttcacgcgtccgaaacccgcgcccgggcatgggcgcgtgacggttccgtgacgctcacgcatcgtcgttcattcgttgattcaccgattgccgtcgggccggcgccttgcggtcgagacgccggcccgacagtgcttattcggcaggatgaatcagattccatccctgggtgatgacttcagcatacacttcatccgggtcgagctgacgcagctcttcgctcaggcattcctcaagcgtcctcgtgggcacgctgatggattgcggcgactggccaggcgtgctgatgacggcgatgccctccttcgcgtctggccgctccagactgagcgtcccgtccgcgcgcgtcaagtatacgccggtcacggcggtcgcgccgggcacctcctccatgatgacgggcacgttgagcttcagccgcagccaggccgccagcaaatccatgggcaggaagcccttcggaccggagaccttcaccgtgctgatcggcaggtgcggcggctggtcgagcatggtggcgagcatcgcacgccacaccgtcaggcgcgtccatgccatgtccacgttcttcggcgaccagttgcggcgcagatcctcgatggtgcggtaggggttcgacgagtgcatggcgtcggtgatgcgactcctcgccatcgcgccgagcaggtccttggacgggttggccggcgcctcgttcggccaccacgccacgaccggcgcgtcgggcacgagcagtgggatgaccaacgtgtcgggatgatggaccagcccaccacgcgggtgcagcacgatgatctcacccgcaccggcgtccgcgccgaagcgcacctgggcgtccagattggaattgtcgtacgccgcatccgcgtcctcggcgggctcgggcgcaccctcgacgggcttgcgcgctccatttccacgccgcggggagatggcgatgacacggcacgggtgctcgcggctggcggcgttggccagttccagcgcctgctccagctcgtcctcggtggtggagatcagcagcgtcagcacgcggccggtcgccgactcgccgcgctcctcgtgcaactcgtcgatcttctgcgatatctcgcgggtgcgggtgttcggcatttcgataatcatggcatcctccagtggcgtccgtcgcgtgcgagcatttcatcggcctccgtcggcccccacgtgccggcacgatacggctgcggctgaccgagcgtggaccagaattcctcgatcgggtcgaggatcttccacgacaggttgacctcttcggtggtcgggaacagcggcgggtcgccgagcagcacgtcgagaatcagtcgctcgtatgcctccggcgagctctccgtgaacgaacggccgtagctgaagtccatcgagacgtcacgtacctccatcgccgtgccgccaggcaccttggagccgaagcggatcgtcacgccctcgtcgggctgtacgcggatcacgatcgcgttcttgccgagctcgcgtgttgcggtcgactcgaacggcaggtgcggcgcgcgcttgaacacgacggcgatctcggtgacacgcttgccgagacgcttgccggtacgaagatagaacggcacaccggcccagcggcgggtgtcgatgtcaagccggatcgccgcataggtctcggtggtagacgccgggtcaatgcccttctcctccaggtatccgacgacgtcatgcgagccctgccagccggcggcgtactgtccgcgagcggtgtgtgcggcgaggtccttcggcagacgcaccgcggagaggatcttcgtcttctcggcggtcaggtcggaggcggtgaacgagaccggctcctccatggcggtcagggccagcagctgcagcagatgattctggatgatgtcgcgcgctgcgccgatgccgtcatagtatccggcgcggccggccacgccgatgtcctcggccatcgtgatctgcacgtggtcgacgtagttggcgttccagatcggctcgtacatcgcgttggcgaaacgcagcgccagcatgttctgcacggtttccttgccgagataatggtcgatgcggaacacgctcgacgggtcgaacacctcggagaccacacggtcgagctccttggcgctggccagatcgtggccgaacggcttctcgatgatcacgcgtcgccatgcaccctcggacgagcgggccagtccgcagtcggcgagctgacgcgccaccacggggaacgcccgcggcggcaccgacatgtagaaggcatggttgccgcgcgtgccccggtcgcggtccagttcagcgaccgtgtcgctcaaccgcgcgaacgccgcggagtcatcgaacgtcccctgcacgaaacggatgccctttgcgagctgcttccacgtcgattcgcggaacggggtgcggcaatgctgctgcacgtgctcgcggacgaaatccctgaaatggtcttcggtccagtcgcggcgtgcgaagccggtcagtccgaagctcggcggcaacaggccgcggttggcgaggtcatagatcgcgggcagcagtttcttgcgcgacaaatcgccggtcacgccgaagatcacgatgctgcacgggcctgcgatgcgcggcaggcgcaaatcgcgcggatcgcgcagtggattggtccacgcggttggcgtggcggaaacggaatcagtcatacgcaccatagtagtgatgcgcgtgcatctcatggcccattcctctcagaaagaaccatgcattgcatcatatcgcgggattttggcgcggcgagaaccgctccgggaccacccccagtcgctacgcgacagtcccaagctggcgtcagagcgtgggctggtccgtctccccgctctgctcgccggtctcgccctcatcctcccgcagtccggattcgagtctccggttgcgttcgcggagcctgtcgttctccgcggtcagctcgtggatgtaccggatctgctgcgctatgagcatatcgcgcaggtccttggcctccgatccgccgaaattctcgcggatcgtggccgtgcgaatcggtgccggcggaatcagcggattgccggtacgcgggaacttgtcagcggatatcggctcggcgtcgtcatcagccggttccatcatcttccaacgcgcgatgcaccgttcgatgcgcttgtatccgataagcgccgggtcaagcccgacgtcgcggaatatacccgtcggcgagtcccccgcacgataccgctgcatgcagtattcgcggaactggtcggtgtatcggatgcggttccgtccgacgctgttcacggcaggcagtgaacgcaggtagtcaatctcgtcgtcgtcaaactctctgtctttcatgatggtgccctccagcactcttctcatcgatagagacgcacatgaaacggaggttcgccgggattcactgcactgtcttccccgcagtatcctccgaatcgggacgcccgccctgcctcgtgaaaggcaggcggatggccgagtcagccgccgatatacgattcgcggcgtgcacgggtcatcatcggcgacgtgcctggcagccgtgtctcgcccaaaacagtcgcgacggatgtcaccgcggcgtaggtctccgacttcacagggacttccgagggttcgggggtgttcggcgcgtcgggggtggaggttttcagcacgggcttggcatcggccatggaatcgatcatgtgaccatcgacttcgccggtcaggatgacgtcgacgccattggcgatgtcaagcgttgcggccagagcgatgttggcggccggagcggcggatccggccttggcggcggtcagcggggcctcatcacccacgcgcatgactggggattgcgccttgtgcaccgcgtttgcggcggcggcatcgcctgtatatttgctggatgatattgataatcgttgcctgaacctgacgacgaaacgtcgattttcccgaaacatgatacatccttcacttcttgcttcgggagggttcatcctacgcaaaaagcgcaaaacaagccccccccccccgtgatttcgaagtgtagcgccagcgggaagatatttgggggactatgtttctaaggggttatgacggggagttacgggggtgtctttggcggcgcgatatggtcatgcaggagacccatatgtgtgcgcgagcacgtcggtatggccggtcaccccatacaggtgcccggccataccgcagccggtcaccggcgacgggagcgcgccgtcgtgatggagaatcccgcggcaagcatgatgcacgccgtcactgcgagcagcagcgtctgggcgcccgtcttcgagagggtttccgtgcccgccgtgccaggtttggaggtattggcgttgccgccggcgccgggcttgacgccaccgggacgctcggtctgcccgccgctgccaggctgctcgggatcctcgccacctcctggttcctcaccgccgccgggctgcttgcgctccagcccgtcgcgagcctgagtcagggcctttacggccttgtccagatcgccctgcgtggtggatcgccgtccgcactcctcctgcgcggcggccaacgcctcggcgaacgccttccacgattcggcagtgtaatcgccttccttgagagcctgagccgacgcgatggcgtcagacagcgggccacggtccagacgcgcgtcggacagcgcggcgatggcatcattcagccgtgccgcaagggtgtccacgtcggcctgggagatgtgcgccatgtcggtgtctccggcggccgcaagagcctcacgcatcgtcgcccacgcagccctgtcgtactgcgattcgaccagaccggtcgccgcccgcttcgccgcatccaacgcggccgcatcgatgtgcacgatcgactcgttgaacgcgatcgtcgcctggcgcagcgcgtctgccgcggcgtccaccttatcggcgtctccggcggccgcatcgtgtgcggccttggcgtcgtcgatggcctggcgcagagcgtccgcggcgctttgcggatgctgcccctcgtattcgccgacgctgcccgccgtctgcgcgtcctccagcgtcttgaccgccgcatccagcacgacctgatagcgctcctgcgcgtcaagctgtgcgagcgccgtgtcggccgaccgccgcaacgcagccgcggcgtcatcgagatcctgttgcgtcaccgtgccgtaggcgtcggagacctgcttggcgcttgccctcgcctcggccaatgcggccgacgacgcgggcaggccatgcgcgtccagagacgcgatcagcgccgcggcgtcatcgatcgccacatacagcgcgttgcggtcgagcgacacgtagccggtgcggtagaactcggacaccgcgtcttcgacggtcgtcgtccaccggccggcctcgcgcgaggtcagtccggcgtccagcgccgcccgcgcctgctccagcacgacttcgagcttggtcttcgccgcccgggtgacgttgccggcgtattcgccgacggtgagcttgccgagcgcggtctcgacggacgagaggtagctttccagagacgcccctgcatccgcctgatacaggtacaactcgttgatggcgacggggttctcgttgagcacggtgatgcgtaccgcgtcggtgtagacgggccgtgcaaggcgggccacgatctccggcttcatctgcgcattgccggaatagtcggtcagcgtcttccactggtcggctgcaccatcgcccgcaccgccgccgtcctgcggcaccacgcggtattcggccttgaaccgcaccggctcgctgttaccggaggccagcaggccgagcatgttgatgtccgcggccttcgcgagcgtgaatgtcagggtcttgtcagccgtggccgtcaaggtggccgcgctgttgcggtctccgtccgtcagcttggcgaggtcggcggccgtgagcgtcgagccgtccgaggccgtcgtcttggcgtcgcaagccacgttgccgggcgtcgcgtagacctcgatctcggacaccagtggccatgcgggcgagccgctggaggggatgcgggcgtcggcgatgtccatgcggatgcgtgtgatgctcatgccgaccggcacgtccatcacgatgccctgctgtttgctcaggtcggcttcggttcgttcggcgaccgtatgttcgtcgccgttcgcgtcgatcaccttcaacgtgaactgcatgctgcggtcgggctggccttcctcgaacttgagccgtatgctgtcgacctcacgggccttggcgtagtcgagctggaaccatgccggcgtggcgccgtcgcgggacacccatgcggtcgccttgccgtccaccagcgcgccggcgttctcgggcgcgtccttggtgggcgacgacgtgatgacggccgaggtggcgatgttcacgccttcgatggtgtcgccggcctcctgcagcagttcgagttcggcgagcgccggccatgcggtgccgccgaccgaccccgtgaactccacgatgacgtgttcgacctcctcgccaagattcgccgcatacacctgatcgagggcgccctggttctgcgtctcgtcgatcagtgtccgctcggtaccgtcagcgagccccgcgacgaccctgaactggaacaggcggccggccgtctcgaacacgagccgcacgcggtccacacgctgcgccgatgccaggtcgatccgataccagttcgggtcggacccgttgccgacccacagcgtaccgtcgtcgccgtcgttgccgttcgacgcgggccgctcgctggggccggcgcttgcggcgccgccaagcgccagattcgtgtactcgggctgcggctgcgcggctccccagacggacagctcgtagatgccggtcaggtcccgcccgttcgtcgaatgcaacttccaacgcaccttggagccgagtatgtcggcggcgacctcgttcttggagctgacggcatcggcttcactgcggcctatctcgacccatcccgagccgttccagacctcgatctcgtagcgcagcgggaagtcggccgcgatctgctgcagggtgatgccggcgccggtgatcgaatacgtgccgtcgaggtcgaccaccagcgtggcgtcggtcttgcccgtctgcgtccagccggtgtcggtgttgccgtcggtcacgtccgggacgacggtgccggtgtcctcgtcggtcacgtcatgtcccagcgccaggttcgtgcgttcgaccgcggtgccaccgtcggtgacgtcgtccatcgcggtgaccgaatactggtcgaggatgatcttgccgagcgctttctggtcgacgtcatccgcggcttcggtcgcgaaaccatacccgtcctcgtcgcttttgcggttcgcccactgccagccgtagtcgaaccagtccgggtcggtgaagtcggtgccgtgctccagtttgttcagccggttgtccacgtacgtcttccaccgccgatagtagtagtcgccggtcagcccggcccactggcggttggaatagtcgatgagcgagccgttcttgttcagaccccacgtggtgacgagcgcacgcgcgttgagctcgaacaggtcggcggtccaatcgtccgcgccgtcgagcatcgtgcgggcgtcgtcgatccatgcgcccacgaggaagtcgtccgagctggaaagcagcttgtcctgcgccttgatgatgtccagcatccgggacgacagtgtccggaacgtctccagatcgcccgacttgtacgcctgcccggcgagcggctggtattcctggaagctgttggccagcacctgccgcatcacgtcgacgtaatcgtagcggaagccggccgagtccttgtacgagtcatacgcctgctcgaacagggccgcggccttctcgaactgccgcttgtcgtaatctatgtcgctgtggccccacgtggacgccgagccgatggtgttgtcggacgggcgggcgttgatgatggattcgcccgcaccctgatagtattcgccgtccgtgtgcttgtaggcggtgtcaagcaggatgtcccacgccttctcgatcgtcccgtcggttccgccgtaccggcgctcggcatactcctgcgtccaggagcgatagtcgaccggatcctgctcccaggtcatgtcgaacagcagctcgtagacgatcggcgaattgtcgatggcttcgggcgtgatgccgatgccgcgcatgtaaccgctggagttgtaggctttcgtgatgtcctgggagatcacctccggcactccgtcaaggcccatgcgtccgccgaagttgtgcaacatgttccacacccacggcacgccctggttctccatcgggctggcctgcgagcgcaggtcgctctgcaggtcgagcacaagcgcctgacccttgtccgcgagcccggagagcttcgtctcgtcgatgccccactgccactgctgcatcacccacacggccgccgggtcatggtcgagcatcttgcgctgcacggtgcggtagatgtcgacgatgtcgaagccgtctggaatcgtgccgccctcatggaacggatcgaccgcgtagtagttcgacaccttgccgaacacgttctcctgagctttgtagaacgtgtcgccgaccttctggaagtagtcctccttgccggccgccttgtcggcgtcggtcagatacgtcttgatcatgtacgggcgatcgaaaccggaccatgtgccggacgacgcggccaccgacgtcgggttcttctcctggaagtcggccggcacctgaccgccgaagccctggatgaccggcgtgatgccgtacgcctgcatgcggtcgtggatcctgcggccgagctcgacgcgctgctcgaaccatgcggcgggcagggggcctccgaccgagtacaggttctgcatgtagaaccatgcgtagtatcccggcccggacaggtattcgcgcacctcgtcgtcgctgtagccgtattgggtgagcgtctcgcgcagcacctcctcctgtccgacgatgtcgagcatgaggttcacgccgttcatcgccgcccagtcgaggaacggctcgtaatcatcccagttccagaacgccatcgtgtacgagtaggtgcagaagttgagcgcgtaccggtactcgtagttcgtgtatttgaggattttccggccgactgcaggcaggctctccggcatggacagctgggagccgaacagcgggttgtaatcgaccttgcaccagtggcgcagataataattgaggccggatgcgagcgagacgccgttgttgccgcggatggagatccggtcgtcgccggcgtctgagatttcgaacacgtccttgccgtcggccttgccgcgcagctggaagtcgaacttgtcgacccaccgctcgccgatcacgcggccgacgaggtttctgacctcggtgacggtcttctcggcggcatagtcggcgtcggtctctacgcgggcccactcccggccccacgagcttgagtcgaagtcggtgacggagatggccttggggctggcctgctcgtcggagaccttggtgccgtggaaagcgacttcggcgaggttgacctgctgggcggcggagttgtagctgacgctgatgcgcgcgtatgcggcttcggtggcatcgatgggatgcgtgtcggcggcaccggtcgcgggggcgtcatcgctcttgtaggccaccttgccgtaatcggcgccgtccttggacagatagacctcgtagtggtagtacgagccggcgaggttggtgatgtcgatctgcgagatgctgtatgtgccgtgcaggtcgaagtcgaggaagcggcggtagtcctgcatcgacgagtctgcgggtgactgccagtaggtcgccggatcgccgtcgactgcggcggccgcagcatggccgtccgcggcggcaccgctcgccgtgacgccggcgatcgccggttccacggcgcgcgcgagacgtccggatgtgatcaggccgcacatgagtgtcgccatggcgataagcagggccgtcgcgcgacgccgccatgatcggtggcaggtcggaggatgttcgggcgagtgcccacgacgatgacgagcggatgaaaccatcattggttgcccttgccttctcttgattttcagtaagaaccgcaccggcggacattgccggattttgttaacaatatatacaaagaatgggacatggcgcgcccgcgtcacaccgcgccgcgccgctttcaaccgcccctgtaccacacaatgcgatttttggcggttcttgtgctggtgtggtacagcgccgattcaggacaattcgggcgaattcctcagatcattggaaaatggcggttcctgattttttgttcgttgccataccagctcaaaaacgcgtcgaaatcgcattgtgtggcaaacgctgtgccacacaatgcgattttgaccacaaattgacgtggtgtggcacaatccccagatgccggaccgcggatatgccggcaatagacaaaaagggttccaggcgatgcacccggaaccccgatatgcggacagggcgagattcgaactcgcggtggcttgcaccacaacggttttcaagaccgtctctttaggccgctcagacacctgtccttatgtgcgccacgagcgcacaagattcaattatacatccggcgcggatgttctccgccaccggatgcggtcgacgccgaagcgatcaggcttcccacttggtcggctcgatgacttccttgccgcccatgtaggggcgcatggcctgcggaatctcgatggagccatccttctgctgatggttctccaggatcgcgacgagccagcgcgtggtggccagcgtgccgttgagcgtggagaccgcgcgggtggaaccgtcctcgttgcgctcgcggatgttcaggcggcgggcctggtactcggtgcagttcgaggtggaggtgagctcgcggtagcggccctgggtcgggatccacgcctcggtgtcgaacttgcgggctgcggaggaaccgagatcgccggcggcggtgtcgatgacgcggtacggcacctcgaccttggcgagcatctcctcctccatgctcagcaggtgctggtgctccttgtaggagtcctcctgcttggtgtagacgaacatctccaccttgtcgaactggtgcacgcggatgatgccggacgtatccttgcctgcggcgccggcctcgcggcggtagcaggagctccagccgcagtagcgcagcgggccgttggacaggtcgaggatctcgttctcgtgcatgccggcgagcgccacctcggaggtgccgaccaggtactgctcgtcaggctcgcgaagacggtagatctcgtcggcgtgggagttgaggaagccggtgccggccatgacctcgggacgcaccagcgtcggggtgatggcgagcacgaagccgtgcttctcggcctgatcgacggccatggtcagcatggcgatctgcatgcgggcgaccgcgccgcgcaggaagtagaagcgggagccgccgaccttgacgccgcggcgcatgtcgatgccggccacgccggtgccgagggtcaggtggtctttcggctcgaagccttcggccgcgaagtcgcggggctggccgaccttcttgacgacaacgtaatcgtcctcgccgccttccggggcctcgggttcgacgacgttcgacagcttccacatggcggtggtgtattcctcggcggcggcgtccgcggcggccttgtattcggcgaccttggcggacagctccttggtctgcgcgatcagcgcggccttctcgtcggcgggcgcggcggcgaccttcttgccgatctccttctgctgggcgcgggcctcctcgaactccttgagcgcggagcgacgggtctcgtcggagcgcagcacctcgtcgaccagttcgacggattcgccgcgcttgcgctgggattccttgacaatgtcagcatgttcgcgaatgaattgaatatcaagcatgtgcctaacactaccgccgtaagccgacacggacaatacccctcgaccggcccttgaacggcccgccgcgcacatcacggccgctccctcccctcgaccggcgcggccgttgcatcgccgcatccgactacggagccggagaacagagttccgagcggattcacacgacgttcattgcggctccatgtgccgtctcttcgggcttcctacgctggcgttgcacatcggttcccgtgcgacgaccgttcgcgccctgcgacgcgtcgcgcgggaatctttagcaagaaggagtatccatgcgtatttcaacacgcattcaaagcctgctggtctcggcagcgctgctggtgccgctggtggcgacgccagtcaccgcagcctacgcgcagccgaccgaggaaaagaccgcggcgtcctggtcgggcgtcgtcatcaacgaggcatatctatccggcggcagcaagggcgccgcatacaagaacaaattcatcgaactgtacaacaccaccgacaatgacgtgacgctcgacggcacctcgctgcagtaccgtccggcgagcggcacaggcgcgagcaacgccgccgccgacctgaccggcgtcatcaaggccaagggccactatctgatcaaggcgggctcgaacggctccgacggtgccgagctgccgcaagcggacgccaccgccaccagcctcaacgccagcggcaccaaaggcacgctgttcctcgccgccacgacaagcaagctcagcccggccgccggcgacaccacggcgaacgccgacatcatcgacgcgctcggctacggcgacaccaacacgttcgagaaggcggctgccaccgcgccgaagagcaacgccgacgtgaagtcgctgaaccgcgcgaacggcgtggacacaaacgacaacagcgccgacttcacgctgagcgccgacatcacccccgaaggcaccggcgaagaatcccagccgacaccgaaaccagacccgacgcccggcgactgcccgaccggcgaggccgaaatcgcgcagatccagggcaccaccgacaccagcccgtgcgtcggcaagaccgtgaccaccacaggcgtggtgaccgcggcctacccggacggcggattcaacggctacaccatccagacgccggcaaccggaggcgcggtcaacctcgccgagcacaaggcgtccgacggcctgttcgtatacgattcgaagaacgtcaaggatcttcagatcggcgactatgtcaaggtcaacggcacgatcagcgaatactacggcctgaccgagctcaacgcgagctccgtcacgaagctctccgacaaggtcgaggccccgaaggcctccaccgtggcgttcccgaagaccgacaccgagcgcgaaagcctggaaagcatgctgatcgcgccgcagggcgactacaccgtttcggacgtgtacaacacgaacaagtacggcgagatcggactcgcggcatcgaacaagccgttcctcaaccccaccgtcaagggcctcaagggcgacgccgaaaccggtgccgcataccaggccgaactcggccgcatcgaagccgagggcgtgtacctggacgacggctccagccgcaacttcctcgacacgaagtacccggacaacgccgacacgccgctgccgtacctgtcgaacgaccagccggtgcgcgtgggcgagaaggtcacgttcaccaagcccgtcgtgctcgactaccgcaacagcgcgtggcgcttccagccgaccgaacgcctgaccggagacaacgccgacgcgcagccggtgacgttcaccagcacccgcaccgacacgcccgatctggccgcggtcggaggcgacatcagactcgccacgttcaacgtgctcaactacttttccaccaccgccgacgagaccggctgctccacgagcaacgcctacaccgaccgtgacggcaacccggtcaccgcgaagaactgcgacgtgcgcggcgcatgggacaaggccaacatggaacgccagcgggcgaagatcgtcaaggccatcaacaacctcggcgccgacgtggtctcgctggaggagatcgagaactctgccaaggccgccagctccgtgccggcatcattcaagggcgagcgccgcgactacgcgctctccacgctggtcgacgcgctcaacaagcaggccggcgaaggcacctgggcctacgtgcccagcccgcagaccgtccccgacctcgacgtggaggacgtgatccgcaccgcgttcatctacaagcccgccaaggtcgcgaccgtcggcgaaacccgaatcctcaccgactccgacgcgttcaacggcaagaacggctacgagcacggccgccagcccgacgcccaggcgttcaaggccaagggcgccgccgactccgacgcgttcctcgtcgtcgccaaccacttcaagtccaagggctcggcgagcaacgcgctcaaccaggatcccggcgacggctccggcaacgccgactacacccgtcaggcgcaagccgacgcgctgctcgcgttcaccgatgaggtgaagagcgatctcaagctggagaaggtcttcctcgtcggcgacttcaacgcctactacgccgaaaaaccgatccagaagatcgtggcggccggatacaccgacctgagcgagcaggtgagcgaaaagaccggcaagtacacctacgcctacaccgtcaaggacgaatccggcaacacgaacggagaggtcggctcgctcgaccacatcttcgccaacgaggccgcgatgcggtccgtgaccggcgcggacatctggaacatcaactccgtcgaatccgtggcgctggaatactcgcgctacaactacaatgcgaagaacctgtaccaggccgatcagttccgcgcctccgaccatgatccggtgatcatcggaatctcggcctccggcacgaccggcggcacggccacgctgaatctgctgaacttcaacgatttccatggccgcatcggcaagaacctgacggtgccgttcgccgctaccatcgagcagctgcgcgccgagcacccggattcgtcgctgctgctggcggccggcgacagcatcggcgcctcgctgttcaattcgtcggtgcagaaggaccagccgaccatcgacgtgctcaacgcgctggggctcaaggcctccgcggtcggcaaccacgagttcgaccaggggtacgacgacctgaccggccgcgtgatcggcaccgacggcaagcgcaacgcgcagtgggattatctcggcgcgaacgtgtacaagaagggcaccggtacgccggcgcttcaggaatacagcatccagaacgtcaatggcgtgcgggtcggtgtgatcggcgtggtcacgcaggagacctccacgctcgtctcccccggcggcatcgaaggcatcgagttcggcgatccggtcgaggccgtgaaccgcgtggcccgtcagctcaccgacggcgacgagtcgaacggcgaggccgacgtgatcgtggccgaataccacgagggcgccgcctccaacgaggatgacgccaccgccaagccgaccatcgacgagcagaaggccgccagcccggtgttcaggaagatcgtcgacgacaccgacccggcggtcgacgtgatcttcaccgcgcacacgcacatgaagtactcgtacaccgatccggcccacaacggacgcccggtcatccagaccggcagctacgccgcgaacatcggccaggtcgtgctcgactacgacaaggccaccggcaccgtcacctaccgcaagtccggcaacgtggcggtcgacaccagcaagagcgacgacgagctcgcggccgccggcgacgacaccgtcaggaacgtgaagagcatcgtcgacgccgccgtggccaagggccaggaggaaggcggcaagccggtcggctccatcgccgccgacatcaccaccgccttcaaggacggcgcgcgcgacgaccgcgcctccgaatccacgatgggcaacctcgtcgccgactcgctgctcgactcactgtcgtccgaggaccgcggcggcgccgaaatcggcgtggtgaaccccggcggcctgcgcgccgaattctgcaagaccggcgacaacgagaagtgcacgatcgccgccgacggcaccatcacctatgcccaggccaacgccgtgctgccgttcctcaacaacctgtggaccaccacgctcaccggagcccagttcaaggaagccctcgaacagcagtggcagaccgacgccgacggcaacgtgccctcccgcccgtacctgcagctcggcctgtcgcacaacgtctcctacacctatgatccgaacgcggcgcagggcaatcacatcacttcgatgaccgtgaacggcaagccgctcgacctcaagcgcgagtaccgcatcggctccttctcgttcctgctgcagggcggcgacaacttccgcgccttcgccgccggcaaggacacgaaggacaccggtctggtcgaccgtgacgcatggatcgactacatctccaagaactcgccgctcaagccgcactacgaccgtcgcgcggtggccgtcaccggcatcccggccgatggcaaggtcacggccggcacctcgttcgatctgcagttctcgaagctcacgctcacctcgctgggcgtgcccgccgagaccaagctggtcgccacgatcgacggcaccgaggtcggctccgcggccgtcaaggacggcgacaccgccacattgcaggtcgcggttcccgccgggctgccggctggcgcggcgacgctcaccgtcaaggccatgaccaacggcacaaccgtgacgctgccgctgaccgtcgccgccggcacctcgaccaagccgcagcccggcaagcccggccagaccgagcagcctggtcagacgaagcccggtacgggcgatgaacggcacgacggcgcgaacaacgcagccggcaatggcggcaacgccggcgccgtcgagcagctgtcgcagaccggcgcacccgtggtggcggtggtcgtcgccatgatggcgctgctggccgctggtctcaccgcggtccgcacgtcgaagcgagccgatcgcatacgctgaccggccagctgaactggccacagtcctccgcgtggtgggacgcgccccaacgggtgcctcccgccacgcggtttttttatgcgcgcagcgagaccgtgggtggtcgccaacacaccaagccaccgtcagactcgctacgcgagccagctcccaccagcgggagcaagacgacgcacctcccaatgacaacacaagaccgaggccggtcgccgtggcatccgcttcatccctctccccacgcatgcccccgcccgtgaatatcgtgtgggaatcgtcgaatttcggcgggacgaaaccattacaagccacttgaacgttcacaatgggaggtatgccgctagccgccatcatcaccatagccgtcatcgccggcgtcatcgtcctcatcgtcgccgtgacgttcgccctgcgcgcccgccgtcacaagcgcctgtcgcagcagctcgtcaaacgcaacgacgatcaggtgcattacgtcttcgtcgtgaacccgtccaagccgcaggccgcccagcggcgcgcgcacatcgaacagttctgccgtgacaagggactgaccgacgtggaattcatcgacacgcagctcgacaaggacggccgcgcatgcgccaaggaggcgctcgccaacggcgccgacgtggtggtcgcggtcggcggcgacggcactgtccgcacggtcgcgagcgccatgtccggcaccggccatgccatgggcatcatcccgatcggcaccggcaacctgttcgcccgcaacatgggtattccgatcgacgacatcgacgcggcgctcaccgtcgccacatcgcacgggtcgcggcacgtggacgtcggccgtctctcgctgctggacgatccgaaggccgatcacggccacgcattcctgatcatcgccggggtcggtttcgatgccgccatgatcgacgacaccgacccgcagctgaagaagaacatcagctggctggcgtatttcgtcggcggcgtgaagaacctgttcaccccgaaataccggggcgacgtgaccatcaccagcacggacggcagcatgcacacccgtcatggcgtggcattccgcacgttcatggccggcaactgcgggcagatccccgtgttctcgctgatgcccaacgcctcatacgacgatggcatcctcgatttcgagatcatcgacacgtcgggcggcattttcggctgggcgaacctgtttggcgatgtagtgcaccagaccatcaccggcaagcccggatcgaacccactgtcgacgaattcgacgatggaccagattcagggagtgagcgcggagatcacgctggagaagccggtgctggcccaggtcgacggcgacatgctcggccgcacgcggcatctgcgattcaccgtcgaccgcgaggcgctgtgcgtgcgcgtgccggaggtcgcacccgacatgtcagcgacgggaatcatcccgccgattcgcgattgatacgaaaccgacgctctcaaaacttgcagatagaggccattcttcatgaaaaatggcctctatctgcaagttttgagagcgctactcatgcttacgtgcatccgcgacgacccgtgcgacgtgcaacgccaggtatgcgacctcatcttcggtgaggttggagcccagacgcagcgaggcgacggtgccgatggtctgcgcgcactgcatggccttgggatatgactgccggatcgatgcgatgatcggctcgggttccttgtcgagctgcttgccctgatggatgcgtacgaacaggtagcgcaaatgggtgatgaaccggccgacgttgacgctgtgctgatcaagcgagacgccgtaggtctgctcgatgatggtcagcatctgctggatgacgccggtcatcttgtatgtgtcggacaggtcgccgttcgcgaagccggcgttgaccagatgcaacgccaatgccacggtctcgctgccgggcaggacaccgttcaggtgacggttgagttcattgaccagccgcgaggcctgcgcgtactcggacgcgtacagcgactggacttccgcctgcagcggatatgcgatgttgacgtggcgctgcgccctctgcaccgcaccggtgatgtggtcggcgagcgccatgacaagcgtgggctgcgattcggcctgttccgcgagcccggtcgccgtcatggcgtccgtcaccagtcgaatgatctccggaggtatctcggacagcagttccgcgatatggtccgggtctcggccgtcggccggaacgaacacgcgcacgattttcgcgtcgtcgacgcgctggccgggtttggcctggaatcccaggccgcgcccggtgacgatgacctcgcgggcaccgtccttggcgagtacgacgttgttgttgaacacgcgaagaattttcacggcattccttccggccgctcggccgttgcgccgattggctcttgatgcggtcagcgctggatgtccagcacttcctggcccgcctgcacgtccacgcccgtcttcggggtgacgccggcaagcgccgcggtgttcagcaccgtcatcaatgtcgtggtgctgtatcccgcctccttgaccttatcaaagtcgacggtcaccagcgtgtcgcccgcgttcacgcgctggttggcgctgacggcaacgtggaagccctcgccgttcatcttcaccgtgtcgatgccgacgtgcaccagcacttcgatgccgtcgtcagtcttcaggccgaaggcgtgaccggtctcggccacggtctgcagcacgccggagaccggcgcgaccacggtggaatcagtgggctggatgcccacaccctcgccgagcgcgcgggaggcgaacaccgggtcgccggcgtcgtcgagcgacacgacatggcctgcgacgggggcgccgaccgtggtggtgcgaacggcggtggcagtagcggtcgcggtggcggtcgccaccggtgcagcgtccgccggcgccgtctcgacggcggtcccgtcagactcgctggcggcgttcatctcggccttctgctcgggagtacggtaatcgagcatgatgatcagcaccatcgagacgatgaacgacacggcgatggagacggcgtacacccacatctggctgaacaccgggatggtgagcagggaggtgaacgcgaacgcgttggtggtcacgccgcgcaccgattcgccggctgcagtgacggacgggaacagccagccgagcaccgcgatgacgacgccaccggcgaagcagccgaccagcatgcgcttgtagatcagcttgtagcgcaggtggatgccgtacaggctcggctcggacacgccaccgagcaggccggcggcgagggcgccgagcgaggtctgacgcatgtccttgttcttgtcgcggatggagatgaacagcacgccggcggtcgcgccgaagcaggcgaagttccacacgcccatcgggccctggatgaagtcgtagccaagggactggatgttcataagcatcagggcgttgagcggccagtgcaggccgagcggcacgaggaacgggtagagcatcgggatcaggatcgcgaagatgaacggggcgtggccgttgagccaggccaagccgacgccgagccagttgccggcgaggatgccgagcgggccaatgaggaaggcggtgagggcgccgacgatgatcatcgagaagaacggcacgaacacgatctgcacgctgtcggggacaatcttcttgagcccgtggtagacgagcgcgagcacggcagccatcagcagcggcacgaacacgttgccgctgtagtcgttgagcagcatcggaatgccgaacaccttggtcgagcaagaggtggtgcccagcgtggcgctcttgacgcaggtggttacgtccttccacttttcggagtccatcaggtcggcgaactgcggggtcatcagagcggccatgatggagccaccgagccacgggtcgaccctgagcttcttcgaggcgttgtaggcaatcatgatcggcaggaagtagaacacgcccttccagatggccttgatgaacaccaggctggtgttggcttcctcgctcggcacgataccgatggagatgcacaggttgaccagggcgatgatgatcgacgcgccgagcagcacgcccaggatcgggcggaacgagtcggacaggtactcgaagaacgagtccatccacgcgactttgccgcgcaccttggcgcgttcggcggctttgacgtcggcatcggactgcgccttgtcgccggcgaccgcgcccttgccagcgccgacgcccgccatctcgggcaggtgcatgatgttctcgtacatcgtggcgaccgcgccgccgatgacgacctggtaacggtcgccggactgcggcaccgcccccagcactcccttcatggtctccagccggtgctggtctactttgcccgcgtcgacgagttcgaagcgcaggcgagtcgcgcagtgcgtcaggctcttgacgttgcccgcgccaccgatcgcttcgatgatctgcgatgcagttgatgctgccatctcacatccctttccgtgaatcttccattgatccgtctccggtgccgggccgcaaaacaaaaaaagacctgagatatggatagtcctatccgtatctcaggtcttgcgtcttgtcgacttgcaaccctgcattgagtcgattgatatgttaacttcagatgaactgcgacacgccgataaatcacaaagatggaatcgcaaccattcgggcgatgagcgggtagccgatgcgccccgcctttcatctatataaacatctatataagcatcatcgccggctcatgcgacgcatgtttcgcgggcacccgtcactgtgcgcgggtcgcgtcacgctgtgcgaccccgcaccgagtgacgctatgacgaaaacccttgcaatcactgggctttggggatatcgtcactgtgcgaggggtcgcgcagcgtgacgcaccccgcgcacagtgacgcaaaacccgcgcagcgtgacgaccggtcggaacatagagcaccgaccggccgtatggcgtggaaccattttcggatctcgccacgcgagacatcacccgcaattgacggggcgggcggcgcgctcgcggctcagcccgcacgcacgccgccttacggacgcatcacggcgcccatccgcgaagacccgctaccgctacagcgtgaacttccgggaagcggcggctccggtcgtggcgaaatcggagcccttggactgcagcgaggccacggccgtcaccttgtgcgagccgggcgcaagcgccttcggcagacgaactgtccaggcaccggcgttcccgacgatcgcgacgtagctcttgccatccaccgtcaccgtgaccttcgcgccggcggcggcatcaaccataccggatatctggccggcggcgagcttggcgaacttcggctgtccgacgttgatggacaggttgaagccgtgcttgaacatcgcctcggcgttgtacttgccgtcaacgatggcgaagccaccggcgaccgcatcgtcatcggccgcgtcatcgcaggagctcatgttgccgtacgaatccacgccgatcgagtagtggccggacacgatggcaccgcccgagtcgccgctcagcaggaaggcgctgaagtggaagtcgtacacgtcgagcagcgcgccgttgttgttcacctctcggtgaccttgtcggcggtgacgacgccgcatgtccaaccgctggtcgaaccggacttgcaggcgggcatgccgatggtgacgcagacgcgtcccagacctgcaacgggatgccgtcatcctgcgtgaaattacccacacccttggtggtcaggtctgggccggtggcgtccgcgccccacgtggacagctcggccgggttcttgtacttgctcgtggacaggcggtcgagtataccggcatcgttgttgtcgccgacgtggccgtatgcggtcgcgccgacggtgtcgcgcaaatcggagacgttctccttgcggctgcgtacgtggtggatgccgggcactaccacgaacgcagccgatggcactgtcactttcgaccagctgccgttcgacgctgcaggcacgtacgagtacacgctcgtgcaggtcgccggcaacgccgatggcgtcacgtatgacagcaccgagtacgcggcgaccatcaccgtgaccgcgacggccgacaacacactgaccgccgccgtctcgtatgcgaaggatggcgagaccgttgacgcggccacgttcgccaacgtgtacaaggcaccgacgaagcctggcgagccgacgcagccggctgagcccggtaagcccggtatcagccgaccaagcccagcaagccgaaggtcacgatcttcaagccgcaggttcaggtcgcgccttccgccgatgcggtgaagacgctcgcgaagaccggttccacgaccggtgccatcgtgattgccgccctcttcgcggcaaacgccaatccatcaacctctcgccggttccaagcgcctttgattccccgtgccgttggcatatcggcgtcgatggtcaacacagaccgcctctgccgtgccatttccactcgtcccttcctcccgcgtctccatcccctatgttccgcccttcgccatcctgtcctccggggctatccgtcgtactctgtcactccactaatcaatcctctagggtcaatcgtgcttcctcgcatccttgtcgccgtgtcccctttccgccgcgtccctttcctccgcgtccctttcctccgcgtctcttttcgctgcattcttttccgccttccccctccccgccgtcatcctcttatctggtacaccggtacattacgggttcaaatagccgttattcacaattgcatgtgcgaaatggtcgtttttgggctttgaaacgaccatttcgcacggggaataccagataacggctatttgaacccgtaatgtaccggtgtacctaatgacagagcggatagagctgggcgcacatggcatgcgcaggcagcacgcccggcaacatcaccaacattctcgaacaaaaaatcacaatttctcacaaaaacgtaacccaaatgacaccggtcgtggcaaaatagaagcatggtagcaaacaatgcgggcaagcccgccaccccagctgatctgatcaatgtcgacgaagtcatcggcaagtactatgacctcgtccccgacccggcggttccggagcagcgtgtcatcttcggcacgtccggccaccgtggctcgtccctgaagacctcgttcaacgaggcccacatcgtcgccatcacacaggccatcgccgagtaccgcaagaaggccggcgtcaccggcccgctgtacctcggacgcgacacccacgccctgtccggcccggccgagaagaccgccatcgaggtgctcgtcgccaacggcgtgcacgtgcgcatcgactcccgcggcgatttcgtccccacgccagtcgtctcccaggcgatcctgacgcacaaccgcgcggccgacggcacccagcgcttcgaaggcgagggcctggccgacggcatcgtggtcaccccgagccacaacccgcccaccgatggcggcttcaagtacgatccggtcaccggcggcccggcaccggccgagaccaccaacgccatcgccgcccgcgccaacgaactgctcggcgacttcaagtccatcaagcgagtgccctacgaggaggccatcaagtccgagtacgtcgagggcttcgacttccgcgagcactacgtcgccgacctgggcaacgtcatcgacttcgacgtgatccgcgactccggcgtgcgcctgggcatcgatccgcttggcggcgcctccgtgaactattggccgctcatcaacgagaagtacggcctgaacatcggcgtggtgcgccccgaggtcgacccgacctggcgcttcatgaccatcgaccacgacggcaagatccgcatggatccgagctccccgtacgcgatgaagggcctcgtggaccagctcaacgccggtgcctgggacaagtacgacctagtgggcggcaccgacccggacgccgaccgccacggcatcgtctgcccgaactggggcgtgatgaacccgaaccattacatcgccgtgtgcgtcgagtacctgttcggcggcaaccgtccgggctggccggaaggcaccggcatcggcaagaccctggtctcctcctccctgatcgaccgcgtggcctcgtccatcaatgcgaagctcgtcgaggttccggtcggcttcaagtggttcgtggatccgctgttcagcggcgaggtcgcgttcggcggcgaggagagctccggcatgagcttcctgcgccgcgacggccgcgtgtggaccaccgacaaggatggtctgatccccgacctgctggccgccgagatcaccgccaagaccggcaagaaccccgcgcagctgcatcaggatcaggtggctcgcttcggcgagagctggtacaagcgcgtcgacaccccgaccacgctggaacagaaggccaagttcgccaagctcaccggcgatgacgtggccgccacgcagctggccggcgaggacatcaccgccaagctgaccgaggcgccgggcaatcacgccaagatcggcggcctgaaggtcaccaccaaggacaactggttcgccgcgcgtccttccggcaccgagaacatctacaaggtgtacgccgaatccttcgtctcccccgaggccctggacaaggtgctcgacgaggccaagctcgtcgtcgacaaggcattgggcgaatgagatccacgcaacgcatggccgggctggcggcccgttagccaccaaacgaccgaccccgaggccctttgcggatcagcttccgcgaagggccttcgcattacacccatgggccgtctggatgaacgccgcgaccggccccacctcggatgtggataaccatgtggataagtccgattcacgcttcgctccgcccaccgcatctgatatgatgacggtatcgtagctgcataggacaggactacggctccgacttcggcgcgcgcgtacagtggtgcgcccgctcgcgtcgaccggtcccatcgtcgccaaggaaggggacgaaagacggatacactcggtttgggcgcaccaccatccgcataagtaaggacatcaccatgaccagcaccagcagcaccgacgttccatccgcgatttccgcggacgccctcatcatcggattcggcaagggaggcaagacattggccgcaaagctcgcttcaacgggccgaacggtcgtcgtggccgaagcgagcgccgacatgtacggcggcacctgcatcaatatcggatgcctgccgtccaaatcactgatcctctccgccgatcgggcgcggcgagagggcgcgaaccgtaccgccgaaacccgcgaagcggcattcgaagccgccatcagggagaagcgacgcgtcaccgcgatgttgcgcgaccggaactaccataagctggccgaccagggcaacatcaccgtgatcaccggccgcgcgcgcttcaccggcacccacagtgcggaaatcaccaccgccgacggaccggtcgccgtggccgcggacatgatgttcatcaacaccggtgccacgccgcacattccggacatccccggcattcgcaccacgccgggcgtatacaccagcaccggtctgatggacgtcgatgagcttccgcaacggctggtgatcatcggcgccggattcatcggacttgagttcgcttcgatgttcgccgattttggcacggcggtcaccgtgctgcagcacagcgacgagttcctgccacgcgaggacgaggatgtggcggccgcgatccgtgcacaactggaatcgcagggggtcaggttcctgttcggcgcggacaccaaggcgatcacatcggcggatgacggcatcaggctgtccgtctcgatgaggggtgcgtcggacgtcggctccaaagcgcgtctgtgcctgtccaccgacgcggtgttggtggccaccggacgcacgccgaacgtcgagggcctgaatctcgaggcggcgggcgtggaactcaccgaacgcggcgccgtgaaggtcgatgacctgctgcgtaccaccgccgacggcatctgggctttgggcgacgtgaacggcggcccgcagcacacgtacatctcgctggatgactaccgcgtagtatggtctcagctgaacggttccgcgcgcccgtacacgctgagcgaccgtcgcaacgtgccgtcaagcacgttcctgcacacgccgtattcgcgtgtgggcctgaacgagcgcgaggcgaaggcggcgggactggattacgtggtcaagcgactgccggtggccacggtgcccaaggctcaggtgatgcgtcggccggagggcatgatgaaggcgctcgtcgagaacggcaccgaccgcattctcggcgcgatgctgctcgccgccgaatcgcacgaggtgatcaacatcgtcaagctggcgatggatatgggcgcgccggccagtacactgcgcgacatgatgttcacgcatccgaccatggccgaagcgctgaacgacctgttcgcgtaacggtcgcggatcgcgcgtgtccgcgatacatttacacagcgtccaacaaatcggggctcccctccttggattggaggggagccccttgggttatcggctagtcagcctgccgtcacgcctcacggcggcgacgggcgtaggccatggcgcccaggccagcgcacgtggcgagcgcgatgatgatcgcgaacacctgcacgtcggcgccggtcttggagatgtcgtcacccttatgagtgccgctctgggttccgtcgcccttgttgtcaccgggtgcctgcgacttgagagtcaggcccttgatggcggcttcgagcgcgtcggccatcgcgtcgaccttgctctgctggtcgatggtcagtccgcgcttcacggccttcttggccgcctcgaacttcgccaccgagtcggcggtgtagccgctcaggtccgaggggaccttggcgagcaggtcatcgatcttgccgtagtccgcggacttgtaggcaagcttggcctcggcggcttcgaacgcctccttggcttcggtgaactcggcaatcccgacttcgccttcaccggcggcggccagcttcttcagcgccttgtaggcgtcggagtaggccttgtagctggcgtcggtgtagtagcccttgtcgttgtccttgagcttgatgccgtccacgtagtccttgacaccggtggcgcgggcatccagcttggcgaccgcggcgtcgatggcggcgacgcgctcggcgagctccttgacggtgccggacttgtacagcgtgtcgagacccttgacgaccgggtcggaggtggtgtcgtccttcgcggcgagcagcttggagagcgcctcgtagctggccgtggtgtacttggacgagtcaaccttgccggcttcggcgaccttcgccttgagttcgacggtggagaccagggcctccttcgccgccttcatggcgtcgatgttctgctggttgaggccggcatcccccttggccttgtcgctcttcgccttggcgatggcgtcggtcagggccttgtagctgtcggtggtgtactcgctgccgttaaccttttccatgtcggcgatggtctcgtcgagcacggtggtgtcgggcggcgtcgtggtgcgcaccagcgcgttctcggcagtggtcagcgcggtcagcgcggcggccaccgaatcggtggtgccgttgaccagctccgcctttgcggccttgagcgcgtcggagtacgccttccacgagtcggcggtgtagttcgcctccacgtagttgctctcgtgcgcgatctgggccttgagggcggcgacgttcaccagcgcggtcttggcggtggtgtactcggcggtcttggtcttgaacgtggccggcttggtgccgtcggcggcgatcagggtgtcgagcgcctccttagcggccttgaaagccgcgtaggagttcgtggtgtagtcggcctcgtcgatcgtggcgaagctgtcgacggcgatcgtcgcgagctcacgctggtaggtggagtccttcagcgcggcgagagcgtcatcgacggccttcttgaggcttgcggcgtctgctgtggacaggttgttcgtgtccttcagcgcttccttgacctcgtcgagcgcgtcggtgtacgcggtgaacgtcactgtcgtgtagaagtggccgtcgttggtgacggctgcgtccacgagcttgcgcagcgcggcgaccgcggcggcgtcggccttggtctgcgcggcgtcgatggcgctttgcacggcgctggctgcggcgtcgatcgaagccttgccgaccagcgggctgccgtacacagcctgggcggtggccttggcctcgtcatacgcggtcttggcgttcgcggtccaggcggaagtgtcgacggtcgcgtcgatcttctccttgagcgccgccttggccgtggtgatgtcggcgtcggtgtcggccgagtcgagcgtgatgaactcggagatctcggggatggcgttaccccacgcgatcttgacgctgagcagctgcttgccgtccggcaccttgaactcgttgatcgcctgttccagcgttccgaacgtcacctcggaggcggagcgggcggctgcacgagccgtcacaccggcagtggttccggtcgccgcgtcgtacaccgtaccggtgacggtcgcaccgctggcggcacccgactgcacgatgcggaacgacttgatgtcgctcgggtcatcgatcttgtaggtgagggagccattggccgcactcggcttgtacgtggtggtcaggtcgccgtcgatcatgttgctcggcgcgtggccgcgctcctcgaccttggtggcggagaacgccgcgttcgcctcggtggagacgtaggcgccctgattcaccatgaactcgttgaacgcgagtgcacgctgcgggtagtcggcggtggtcagcagacgcaggtagcgcatgccggtgccgttggcgatgtcgtccttgccgtagtagaagacgttcgggtagttggaatcggtcttcttgttcgtgtcgcttatgtcgccgaacgcggtcgtggtgtcggtgtcggacacgccgtcgccaatctcgaacgcgtcaacccaggtcttgccatcgacggacatctgcaccttggtgtcgcggatgtagtcgtactgcgtgtcctgcgtgtagatgcgcagcgaggtgatgtcgatcggctgaccgaggtcgaacaccgcggtgttgccctgtcgcggctggccggcgaacttgatgaccgtggtcatatcgccgtcgaacgcgttgccgctttcgcgggtgtcggttccccaatcgttgcgcttctggatgtcggacgagaccagcttgccgaacttgccgaccgtggaaaagccgaccttgagcttgttgaccgagaaggccgctccgtcggtgccattgatcacgcgcacgtagcgggcggtcttgcccgtgaggttgcccggctcgacagtggtccagacgagtccgttgtcggagatctgcaggctggggttcgcgttgccggtgttcagttcgacgtcggtcagatcacggatcgccagcagatcgagtccggcgtactggccgccgtcaagcatcgtgtgcgatttgtcgaacagctccgccgtattggcgcccagcgtggcggtgtacccgtgctgcgtcttgttcgtgtacaccgacttgagcggatcggcggtctcgggcggggtcacggtgatctcggccacgcgccaccacacgttcttggcggcggtgttgcggatgcgtacgtagcgtccggtcacgttgccgctcaccgtggaggtgacgtcgtcgctcaggtcgccgagcttggtccaggtggccttgtcatcgctgacctcgacgacgccctggctcggacggtcgtcggggctagaggcatgaccggtaatcgtgacctcgccgatcggcttgctggagcccagatcgacgatcacggccgcgccggccgcgatcttgtcgccgttcgggtccttgaggtaggtgatcgtggacgggttgccgtcgatcatctgctccttggtgctgctgtaggtggcgttgaggttctccagctgcacgccggtcgccgtgtacggagcgagagtctccttctcgaccttgttgacgtcgatgcccttgatgccgagccacaggtcatcgccgttgtcggcggtggcgatcagtcgcacgccggtgatgccggtgatgttcagaccggtgactttgatcggctcctcggagtccttcggacgctcgaacgtcgcatccggcacgtcggtccagttctcgccatccgtggtggtctgcagcttggagtggtagaagtggttcttgccgccgttgaacgcgaagcggatgttcttgagcgtgctggccttgctgaacttcacgccgacgtagttgcccttgtgcaggtagttcgggttctggaacaccgtgaccgtgctgtccttgccatcgaagatgtcttcgatcgagccggaggtcggcgtggtgaacacgtcgctgatgtacgtcttggtcacgacgttcgggtcggcctcctgctgcaccttgttggacaggtaggagtccatcgccttgatgaacggcacgatgtgctgcacgccgacctcggcgtactcggtgtggttcacgtagtagaagccgtgcttcttggacgcggcgaacgcggactgcgcgtcggagtactccttgagcgtcgaggacgtgtcgccgttcagcgcggcctcgatgcccgcgatgtaggcgagcgcggccttggtggtgtcatcccagcagtcgatccacggggcgatctgctcgttggcgtcctgcccggtgtagtccttgccgatgtcgccgagcatcttcgcatcgcccttggcgcggtaggtcttggctgccttctgcagcgtgacgaacgcggccttgatgtcggtcaggtcgtgggcggtgatggtgccgtcagccagcttcgccttggcggcggtcagtgcgggagccaggtccacggactcctgcagcgcggtgacgcgcgaatccatgttctggttgatggtgtgcttggacagctcacgcagcgcgttcgacgcggcggtcggcacagcggagttgtggtcgacgaacgagaacgaatcctgccatgcctggtcggcctcgctcttgctccgccagatgttccacgagtaggtggcgttgccgaagatgccgaccttgctcggctcggactgctgcatcgggttgagcacgatgccctggatcttcgacgggtcgacgcccggatgcaggaacgtgtcgtagccgcccatgatcaggtggctcttcgagttgtcggagcacggccagttgatccacatgtaggggccgcggccgacgttcgaggtgaacgtgtcggtgaagttctgcgagacctcgccccagacgcgtccgccggtcatgacgatctgcacttccttggggaagttggcgaagtagctcatgccgttgcccatgtattcctgcgtgacgaacggcagcgtggtcttgaggtccgggtaggtcttcttcatttccttgagccacgcgaccatatcggtgagcagcttggtgtaattgttaccacccacgttcgccgcgtcatcggccaggatggcgatctggcgtacgccgaccccgatggtctgcgcgaacttgtcctgcagcaccttcagatcggcctgatagttcgcctcggagttgaaccgaatcgcgttgttcatgaacgggtgcagagcgaacacgaaacgcgtcttggaggcgttgccggcatcggcgagcggcttgatcttggtgtcgagctcgtcctgcgtgtacagcgtacgccactgcgagttgtgcttcggatcgtccttgggggcgtagaagtacgagttgagcttgtagtagccgccccacttcatcaggttgatgcggtcctgagtgctccacgggttgccgtagtagccttcgatgaaaccgcggctgaccacgtcggcgtagtcggtgacggtgaagttgcggatcgtcaggctatcgatctggccgagcacctggtacagggtggtcaggccgtagaagctggcgtcggtgtctttgccgagcacggagatcgtgccgttgtcggacttgaggaagtatgagtcggtcttgtcgaagatggcggaatccgggctgtacttgctttcgatggcagtctcggccttgccatcggaaccgttcacgcccacatagacgttggtcttgccgctgactgcggcgtcggattcggtgacgttcaggttcttgagcgccgccacttcgtccagtcggtcctgggtggcttcatcgatgtcatcgtcatagatgacgttgatgtcgcgaagaatgtactgtccgctgtcataacggatcgaatgcggcttggggtacagcgtgtattcggtcgccgccgtatcgccgcctgccgcgtacgccgtctgcacgccgatggccactgccgggctcaacgacagagccgcggcaagcaggcctcctaatgccttgctgcgcatactggggttcctttccttgtccggcactggggacgcgccggctgaatctctcatcattgaattattcgtcaccatgctgctttgcatcatcgtgacacggggactcgtgtgagttcatcattggtcagtattcagtatatatacttaacaaaatatcgcgacgttttcggtcgtgtcgcagcccatcggcgattcatggccgtgacacggcgtgcgttactgttgttgtcatgaccatcaccgtatcgacagacggaagcgccctgggcaatccgaacggcccaatgggctgggcctgggccgaccacgaactcaacatggcacattccggcggccatgagcacggcggcgactgcgatgccggcggcgccacgaacggcacgaatcagatcggcgaattgtgcgcagtgctggaggcgctgcgcgcacatcccggcgcggagccgctggtcatcgagaccgactcgcagtacgccatcaactgttccaccaagtgggtgcacgggtggaagaagaacggctggaagaactcgcagaagaagcctgtgaagaacgcggcgctcatcagggcgatcgacgccgagctgtcgcgccgcgccggctcggtgaagttcgtgtgggtcaaggggcacgcgggcaacgccggcaacgagaaggtggacgacctggcccgcacgtatgccggcgactgccgcagcggcgtgcaggagggatatctgccgaaggagggatggcagtcgctgctggcttcggagtatgccaagggaaccgacgtgccggaggatgcgcagatgctgctggacggcaagatttccacgcaggagtaccatctcgggcgaggcggggaatcgggtgaagcgggagccgagcacgaatcggacggcgacaacgtcgcaaagcgaatccgcaagccatcgttggcggagctgcttgccgaacccgaaggcgtgcccgactacggcgagacccagtcggacacatcatccaccactgcgatgtcagctcctgctgttcccatgacaaccgaatcggacacgaccgtcgcactgccatcgaattcggcacaggccgaggacacacagtccggcagctccacatgctctgtggccgaacctgcggcgccgcggctctcaccgaccgccctcaccgcgtcgggcacgctgcgctttactcccccgccatccaccagcccgacatatgacggacggccgcgcatcatccacggactggttcgcgtggacggatatgtgaacggcgacggcaccatcaccctcgacaatgccgcgttctatacggacaagcagggatagcagccgaatggcgacggttctcctcccaaaacccggacgaacggcggtgacgttccatgaaccggatactatagaggtggacttcaatcccaaagtttgaagcatgtttccctccaaggggaatgcacggacatttcaaggagtacatgatggacaaggcacagcaggatgcactgaagaaggcggccggcatcgaagccgccaagctgatcgagaacggcatgatcgccggtctcggaaccggttcgaccgtgcgtttcctggtcgatgagctcggccgccgcgtcaaggaggagggcctgcagttcaccggcgtgacgacctcccgtcgcacgcaggagcaggccgaaggttacggcatcaagatcgtggacatcgatgatgtggatcatatcgacatcaccatcgacggcgccgacgaggtggacaagaacttcaacggcatcaagggcggcggcgccgcactgctgtgggagaagatcgtggccacgaactccaacaaaatcgtgtggatcgtggacgagtccaaggtcgtcgacaccatcggcaagttcccgctgccggtcgaggtgattccgttcggcgccggccacgtcatcaagcagttcgaggccaagaactacaagccggtgctgcgcctcgacgccgacggcaaggaagtgcgcaccgacgagaacaacttcgtcgtggacctgcatcttgagcgcatcgaccacccgcaggatctcgccgaggacctgatcaacacggtcggcgtcgtcgagcacggcctgttcctcaacatggtcgacaaggtcatcgtcggcgaccccaacggcccacgcgtaatgaccaacggcaacaagtgacctaacgcggcgaatcgccgcctcaatcccggcgccggcagcccccccccatcggagtctgccggcgctgtcatatccagttcgcttccgccagcggggaagagaatgtaaaagccccgcggccgacagggtcgcggggctttgtgtgcgcgcttgcgagcgaacgactacttgcgctggtggcgagtcttacgcagcatcttgcggtgcttcttcttgctcatccgcttgcggcgcttcttgatgaccgaacccatcgtcagcctcccttagtacgttaaagattgcaacttgcccaatagtacacgtattgagggacttacgcatccgcgcgttccatttccgccatgaatccgcaaaccaccccgaattatcacgaaatcacagcgggaacggctcatagaaccgcagcacggattccttggagccagtcacctcgaacacggcggtatcgttctgccacaacgccgtcgcggtcttgccgtcctcactgtcggccctcaccgtgtagctgccggtgctcttgcccgacaccttgacgtccccggacttcagctccttgccggtcaggttcttcgccagctcgtcgtactgcttcttcacggtgtcggagtccgaccattgcgcgacgatgacggtcacgtccttcgccgacttgcccgtggagtacgtgagcgtgtactcctccagcggcgacgcggacttccaggtctcgctggcgcccgccttggtgcgcgcgtagttgagcacgctgtccggcatcgccttgagcagttcggatgcgtcatccggcagcgcggtggccttgatgctcggcttggtaggctcggcggcggtctgctgctgcaccttcgtcacttcgtccgtcttgttcaatgcccaaccgggccatacgaacgcggacagcagcgcaagcacgacgaccagcgcggcgacgatcatcacgacgatcagcttgccgcgcgatgcggaactaccgtgcggataggaaggggattgagtctttgccatgctgtgattctctcacgcgcatacgacgcaacggcatcgtttcgccggcgacgtcggcgtgccgctttgtgctaaggtctgcggtatggtgaagtcggcgacgcgatatgtatgcagcgaatgtggttgggatggtctcaaatgggtgggccgctgcccgcagtgcgggcagtggggcaccgtggaggaattccacgaggcccgtcccgccgcatcgtcgtcgcgcaccgcggcgccgggccgcacctcacgcacgcaggcggccgcgtccatcgtcagcgcggcgacgcccatcacccagatagacacgtccacggcgtcacggctgtccacgggtttcggcgagttcgaccgtgtgctcggcggcggcatcgtgcccggctcggtcgtgctgatcgcgggcgaacccggcatcggcaagtcgacactgctgctggagaccgccggcaacatcgccgcaggccagcccaacggctcggtgctgtacgtctccggcgaggaatcgcaggcgcaggtgcggctgcgggcgtcgcgggtcaatgcgatggagcagaacctgctactggcgtccaccaccgatctcgccaccgtgctggggctgatcgagcggacgcggccgacactggcgatcgtggattcggcgcagaccatcgtctcgcaagacgttgatggcatctccggcggctccacgcaggtgcgcgaggtggcgagcgcgctgatcgacacggcgaagacgctgaacatccccgtgctcctggtcgggcatgtcaccaaggacgggtccatcgccggcccgcgcacgttggagcatctggtggatgtggtatgccagttcgagggcgatccggaaacggcgctgcgtatgctgcgggcggtgaagaaccggttcgggcctacggatgaggtcgggtgtttcgatatgagtggcgagggcatcgaggaggtcagcgatccctcgggactgttcctgtcgtccgccgacgaacgtgtggagggcacgtgcgtgacgttcacgctggacggccatcgcagcctgcccattgagattcaggcgctggtgaccagttccgtgctgccgacaccgcgacgggcggtggtgggggtcgagacgaaccgcatcgctatgctcaccgccgtgctgtaccgacatggcaaggtgaacctgctggcgaacgacctgtatgtatcgacgatcgcgggaggactggcgaaggaaccagcctgtgatctggcgattgtggcggcgctggccagtgcggccaggtcgaagccaatcgcgcgagacacgtgcgccatcggcgagatctccctgaccgggcagattaggccggtgccgcggctggagcaccggctgcgcgaggccgcgcggctcgggttcgccacggcggtggtgccgccgatgcgcaagcgtgtcaccatcgaggggctgcgcatcgtagaggtgacgcatctgcgcgacgcgctggagtctctgggcgtcgtctgacagtgacggtgacggtgacgacacggcacgcgcaagatacgcgaggcacgatagcggcgcgattcagcgcatgcgagcctatgccgataccgttcggacgcaggtggagagaccggcgtctgtcgggcgctcctgccgcgctcaacgcgcggaggtcagttccctggtctcctggacattgcgcgtcaattcgtccttgagcgcatcggcactgtcgaatttcacctgcgggcgcaggaatcccgcgaattcgacgcgcacatcgtgaccatacaggtccagccattcgtcggtgaccgcgtacgcctcgaccacccgctcattgagaccggtctcttcgttgaaggtcggcttcgtgccgatggagatcgctgccggccaccggtagggtgattcggcggcgagcctggccttggatgagccagaatcatacacgcgcggaatcaccgaggcattgccgctgccgctgttgccgtcggaggcattctcgtcggagtcggcggtcgctcccgccgcgcccaaatcgatcagccagccggcatacacgccatccaccggaatataaccgtcaatcatgctccccaggttcgccgtcgggaaaccgattgtgcggccgcgctcctcgccgtgcaccaccgttccctcgatggcgtgcgcatggccgaggatctcgtcggcggccttgatacgaccatgtgcgagcaggtatcgcacgttcgtcgagctccacacgcgcacttcgcgcccctgatgcttcttgctccacgcgcgcagctgcgccttggtcatgccttcggtcggatccacaggctccccaggctcgctcggcatctgcggggtaacgtcggccggcacacgcacatgacctgggccgcggtcgtcgacgatctcaagctcgaacacgccggtggcctgcgcgaggactccgatggccttcacatcgccagcgcggttggcgcccatcgccgcatccgttcccagcaccagcgtgcgcatgcccagtttgccgaccatctggccgaggaagaaccgatatgatttcgtggcgaacgccagcgtatagcgcacgatcagcacatggtccacgccaaggttctccagcgtccgcagccgctggtcgacgctggtcagcgccatggggtcgcggaagccgtcgcccggctcctgcccgtcatgggcggccgcgtacgcgtgcacgacaccgggacgcgggtcgaacatcaccaccacggaaaacgccttgtcggccttggcgagttccaccgctcggcggatgaccgcctgatggccgcggtgcatgccgtcgaacacgccgaccgtgaccacggatttcctgttggcactcagcgtcggccattcgaccagcccggaggcgtccggggcaagagtcgtgattttcataggtgatggtgttccttcacatgttgcgccgtatatgcggcttgtgggcatggttccggccttccatgatacccgccaccagtgcggctgcgccaccgaatgatgaactgttttgcatcatgccgtcccgatgccgtcactgtgtgcgggcgccgtcactgtgtgcgtggacgcacagcgtgacgcataccacaaaacccttggaaaataaggatttctggcattgcgtcactgtgtgcgtggacgcacagcgtgacgcacctcgcacacagtgacgcattacgcgccgaatacggtggccggcttggcctcgccacgcttggcgcgctcgacgagtgccaccacttccccgctctgcggcagatacgcggcggccgtaccgtggatgtcataggggatacgccggccgtaccgcaggttgacggcgtcctgatcggtgatggcgagcagcggcatggtgcctcgcgcggcatccagcatcgtcagcgccttgcctgcgagctcgtcgccaatcacatcgagcacggcgcggttgcgggactggtggttgccgttgcggtcggtgtactcgcgtgtctccacgtgcgcggtgatgacattcggcgaggagacgtcgaaaccgcccacccgcgtgcgccgcagccgtatcaggtgcccgccgactcccagcgccgcgcccaggtcgcgcccgagcgcgcggatatatgtgcccgccgagcagctgacgcgcacatcgacgtcgatcaccggcgtcgcctccgcgtcatcccgttccgtcgtcgcccgcccgtccgccgccgagacgagcggaagtcctagctgccgcgtcggggcatagccgaaccgcacatccagcacaccgaacgcgctgacggtgatccgacgcgccttgagctgcacgtccttgccgtcgcgggccagatcataggcacgttgaccgttgattttgattgcggagaacgtgtttggcacctgctcgatgctgccggtgagctgcaatgcgatgatgtcatcgatacggtcgcgccacagctgctggcaatccggcaaaaacgcttcctgctgcggatgatacgcggagccgtcatccgcgacctttgcggctgccatgaccgaacccttggccgcgttcacaggcccattctcgccagccgactgaggcccaccggcgaccggcaatgccagcagctcttgccagcgctcgggcgaggtagccgacagcagttcgccatcggcatcgtcggtggtggtggactggccgaggcgaatcgtcgcctcataggtcttgtcgtgttcgacgatatggttcagcaaccgcgtagcgttgccgaatccgacgaccagcacgccggtggccatcgggtcgagggtgccggcgtgccccacctttttcatatgcaatgcgccgcgcgcagccgcgacgatgtcatgactggtgacgccacgcggcttgtccacgaccaacaatcccgacgtaggagtcgccggcgcggcggagccagccacgatcggagcctgctcgccgcccgaggcttcgggtacggtccccatcagtgaatcctctcccgtctcgcagaaccgctgatatgcggctcagcggtcgcccgttgcctcgtccgtcgcgttctcggcgtcatcttccagggtctcgacgccgatgccgttgccttcgacgtcgtcatcgtcgaggtcgtccgcgtactcgtcgtactcgtcgtcatcgtcaaactcgtcgtcatcgcgctcttcaggatgcttgtacgggtcggcgtcgcccgcgtactgcgcggtctcgcgcgccttggcgatctcctcgtcacgcttgtgcgcgacagccaggatatcctcgatctcatgcgcctcgctcggcacctcgtcatagatgaactgcagctgcggggtcagtcgcaggccggctttggagccgaccagcgaacgcagccgccctttcgcctgatcgagcgcctgcttggcgcgcttgcgctccccctgctcgcgcccatcatgcccaagctgggtccagtacaccttggcgatctgcaagtcattggtgacgcgcacatcggtgatggtcacgctcgcaagccgcttgtcgtgcagctgagcttccatcgacgacgcgatcacccgttggatcagcgccgcgactcgtgcggcgcgcgggttcgttcctgccataaaaatccttttcctcgattgcgcggcgaaccgctgacaatatcactcgtatcatattcgcacatcccctactcgaaggctcacagcgaatcgttctcaataagaaacatgcggggattgcgcacattagcgcacaatcgaacaaaaccgaaaagcccggagttccggccatcagcagcgaatactgttcattggcgaaaaacgggggggtcgcacgaaccgtaatgagaatggttcgctgcgcccgtccgcgaaaaagcggcggacacccgaaagcgcccgccgcccatgtatatatgcgccttacttgcgctcgacttcctgcatctcgaaggtctcgataatgtcgccgagctcgatgtcgttgaaagtgccgaggttgataccggcctcgtaaccttccttgaccgactgcacgtcgtccttgaaacgacgcagcgaggagatctccaggtcgttgaccgtggcgacgccgttgcgcaggatacggcacttcgtaccgcgcttgacctcgccgtcctgcaccatgacgccggcgatgttgccgaacttggaggagcggaagatctcgcggatctcggagtgggaggtgacgacctcctcgtattccggcttgagcatgcccttgagggcggcctcgatgtcttcgatcgccttgtagatgatcgagtagtacttgatctcgacgccttcacggtcggccagatccgccacctgacggttcgggcgcacgttgaagccgatgatgacggccttgtcgacggtcgcgaggttgacgtcgttctgggtgatcgcgccgacgccgcggtggatgacctggatgccgacctcgtcggacacctcgatcttcatcagggagtcttccagcgcctcgacggaaccggaggagtcgcccttgatgacgatgttgagcatgtccacctcggacttggcgaactgctccttgaggctttcgagcgagacgatcttgcggcgcttcgcgagctgcgcggcgcgttcggtggcctggcgcttctcggcgatctggcgggcggtgcggtcgtcggatgcgaccaggaagaggtcgccggcggtcggcacggatgtcagacccagcacctgcacgggcgtggacggggtggcttccttcatgtggttgccgttctcgtcgagcatggcgcgcacgcggccgtacgaggtgccggcgacgatggcgtcgccgatgcgcagggtgccctgctgcacgagcacggtcgccacagcgccgcggcccttgtcgagtcgggcttcgacggtggcgcctcgggcgtccatatccgggttcgcgcgcaggtcgaggtcggcgtcggccgtgagcagcacggcttcgagcagcttgtcgacgttggtgccctgcttggcggaaatgtcgacgaacatggtgtcgccgccgtactcctccggcacgaggccgaactcggtgagctggccacggaccttctccgggttcgcgcccggcttatcgatcttgttgacggccacgacgatcggcaccttggccgcctgcgcgtggttgatggcctcgacggtctgcggcatcacgccgtcatcggcggcgaccacgagaatcgcgacgtcggtgagctcggcaccgcgggcacgcatggcggtgaacgcctcgtggccaggggtgtcgaggaacgtgatcttgcgcttctcgccttccagatcgacggtcacctgataggcgccgatgcgctgggtgatgccgccggcctcgcgggcgatgacgttggtcttgcggatggtgtcgagcagtcgggtcttaccgtgatcgacatggcccatgacggtgacgaccggcggacgcggcttcagatcctcgtcttcctgcagctcctcgctgtcaaggtcgatgtcgaactgctgcagcagctccttgtcctcctcctcggcggagacgatctggatgttccagccgatctcctcgcccaggatctggaaggtggattcgtccaacgactgggtggccgtggccatctcgccgagatggaacagcacggtgaccaaggccgccgggttgacgttgatcttctccgccagatcggcgagcgaggcgccctgacgcaggcgaacggtctggccgttgccggtggggatgcgcacgccgccgatgacgggtgccttcatctcctggaattcctgacgcttcgcgagacggttcttgcgggccttggacgacttgccgccctgacggccgaatgcgccggccgcgccgccgcgaccgcgaccgccgccgcgcgacggaccggttccggacgtgttggagttgttctggaagccgccgccctgaccagcgccggtgccagcgccggcaccgaagcggttgccgcccgcgggacgggcgccgccggtctgacccggacggttatgcccccactgccccggcttggcgccctgcgctccctgaccgggacgaccgccacggaatcctccgcgaccgccctgacctgcgccgggacgaccgccacggccgccgcgattgtcgttgtggttgccgtttacggtcggacgggccatcgggtgcggacgggggatgtcgcgcggggtgggcgcgtgcatgccctgcttgcggctgaacgggttgttgccgggacgaggccccggagtcgacggacgggcaccgccgttggcggaaggcgcgctgcctgcgcccggctgctggccctggcgcggctgaccctgatgggagcctcctcgggaatcctgcggacggccgccggcgttgccgccgtgaccgggttggtgggaacgcgggccggggaaggcgccgcgctgtcctgaaggcgcgtgcggattgtgacgctgcgcgggtgaaggacggttctcgccgccttcacggttcggtcgagcgtcacgcatgtcgccgcgggattcgttgcgattgtcgcgcggcgtcgtgccgcgattcgatgacggcacatgtgcagcaggcgccgcagagcgcggttccgccggacgcggtgccgcggcgggcttcttgcccagaccgggcttggctacaggtgcgggcttgactgcgggagcacgatgctccgacggtgcgggagccggtgtcttgcgttccgctgcggacgctcccggcttcgcctcgcccttctggaaggcgttcctcaacttgcgcgccaccggcgcctcaaccgtcgaagaagctgattttacgaattcacccatgtccttgagtttgtcaaggacggttttgctgtcgacgccaaaatccttggcaagctcgtacacgcgttttttcgccacattactcctaattctgggccgcgcgtagactcgcgcggctattttccgatgacggattctgcccgtttcatcgtgcaaccatggtcgtgttacctcatatctcgatcccgtggcatgacggcataacgcatccacacccggtgtgccgtgtccagcatactagggacgttggatgtgccgtcggccgcgcgtcaacgccgtgtcgcggatcacttgccttcggcagcgaccttcttcgcgtgcgcttcggtggattcgatgccgatcttccatccggtcagcttcgccgcgagacgcgcgttctggccttccttgccgatggccagcgacagctggtcatcatggatgaaggcgatggcggtcttgttcttctcgctgatgacctgcacgccggtggcgacggcgggagacagcgcagaggcgacgaacttcgccggatcggcggaccagtcgacgatgtcgatcttctccggtccgaggttctccatgacggcgcgcacacgggcgccgccggggccgatcagggcacccttggggttgacgccatcggtgttggcgcggacggcgatcttggtgcgggcgccagcctcgcgggcgatggccatgatcgacacggcgccggacaccagttccgggacctcgcgctcgaacaggcgacgcaccagctcggggtgcgaacgggagacgacgatctcggggcccttgacgccgcgcgccacgttgacgacatacacgcgcagacgctcgccatgacggtaacgctcgccgggcacctgctcgcgacggggcagaatcgcctcgacatcgccgatggcgacatgcacgttcgtcggatcgctggcatcctgctgaacgatgccggtgacgagcttgcccttctggccggagaaggcgccgaagaccttgtcgtcctcggccttacggaacagctgtccgatgacctggcgcgcggtggccgcggcgaggcgcccgaagttgcgcggggtgtcgtcgtactcctcgcccagctccggtgcgggatgagggtcatcctcggtgggctccaccgggatctccttacgagcccacacggtgaacgtgcctgcccgcgtgtcgagctcgacacgggcatgcttggccgcatgaggtgttttcagataggccagacgcagcgcctcttccagtgcggcgtccagttgttcgagatcgattccttgctcgatggcgagctgatgcattcctgccaggtccagttccatactcaagacctcctatgaagttatagccgtggtggcgcgcatatggtcacagtcgtctattagtgtagaggcctatgcagacacgtcattggccagatcacggcattccatgccgtgagaggaacatatcttcgtggtgtcgccgtatcgtcgcggcactctgcatcaccgccctgtgcggcgccctgagcgcctgcagcgcaccccggatcgatgggcgcgcggagtcggaacaccagcccagcgcctgcgagagcgcctactgggccgccgacgcgtcgacggccaccatgaacggccgtcaccatatcatcatgcgatatctcgcggcgaagcaggccgtcgggcagtggagcgaggtggccgccacctgcacccagcgattcgcgcagggcacgatcagaagcgcccaggccgagcatgtggccgtgacgctgggcacaaggctcggtggcaacgacacctaccgcacggtctccgacgacagcctgaggcaggttctgggcatcgacctcgacgacgccaccttgggcgccatgtcgctggccgaggaccgcgccgggttcgtcatggaggtgctcgccgcgcgggatacgcccggcgccaccctgagccggtccgaccggcacaagaccgcggggcaattgctcttcaccgcgtccggcttgagccgcgacccgcgagaaaaggtctacgacatccagaagatcctcgcctcgccgacctcgatgaccgattccacgaccggcctgagcgtgccgacaacggccttgacggagatcgactgcgcccgggagcagctcgccgcaatggccgatgacggggcgtcggccaagtcgaagcacaccgacaagaccggcaacaacaccaacggcagcggcgataccgacagtgcaactgacaccaccgacgtcaacgccaccgataccaacaccgtcggcacggaaaacgacgcacgcctgcgtgtcctctccacgctgatctcctcccacatcacctccgcattcgcactcggctaccccgacatggacgcgttcctcttctcctgatcgcgtcactcccgcagccctattatgcatacgggggtaaaagcaacacccgtacgccgcagaagtcagcccgattgcatatgcgcagcataaccgtttcttcgtaaaaggtctcacgttgccgtgaaacccgatggaaaaacgccaaactcaccctcgatggctcatcgatgagccagtaacgacaacgtagggcccataggaacttttgtggtgcttatgatcgaggtctggccctgtacgagtaggcgtgtcggcatgtctttttccccgcgtggaaaatgatgcgctcccggtggcgggctggatggtgcgagaacgccatccagcaaagcgaggaaatgcccggcatgcgggcgtgcgatgaagaagaacggacggaccggcaagggcacgcaacggtggagatgccgggcctgccggctgagctcgacgatgccgcagcgcggccgcagacgggcgcggacgctggaggagttcctctcatggctgccggggcgtcgtcccagacggcgtcggaatccacgggcgacgcgcgcgccctgcgcaaacgcatcgtatggtgctggtcaatccggctgcgcatcgccccgccggacgcgaagcgccacacggtcatgtccgacggcacgtacatgggccacggctggtgcctgatcatcgccatcgacggcgaaagcggagaagtcctcgccttccagtggtggacgcacggggagctgcgccgccgctgccggcggttggagaaactgttccgcgaggggaagctcttcgcctttcccgggccggcgcttgccgcaggtgggccggtggcgcgcaccacgaaccggctggagggcggcgtcaactcggtcgtcaagaacgtgttgctcaaccaccgcggactgcccgaggcgcacatgctccgcgcgtgcgaatgggtgtgctacatgaagaccgcgcacccacggccggaatcgttcattcccgacgatccgctggaggacgggaaagcgacgtcgcccgaaccggaaggcgacgtctcgcccgcatacgggatcggcgtcgactggaacgaattccacaccggcacgcgatatcccaacggcaccgactgacgccgagaaccagacctaaagcaccacaaaagttcctataagcccgaaagagggttccgggagaatcccggaaccctctttgctggcggatagggcgagattcgaactcgcggaggggttagcctcacacgctttcgaggcgtgctccttagaccgctcggacacctatccatgcgctgcgaaaaaacgcaacttgttcattataagtcgatttcccgattacgcaaatcagcgcgtggcgcacctgccaccgctccatcgagcctccatcggcgagctatctacgtttcgaggggtggattcagctcccgcaaaacatctatctgcatttcaaggggttggtggtcaagtatgacggctcgctaatccgcatgattccaatagcgtaacaagccgaatacatcaggtatcgcgtttgagcaaccccctgaaacgcagatagatgacccgagcagcctcaatcaacccctcgaaagcgagatagcccgcaaaacgccccgggcaaccgccctcacagcagctgctcgtggacggaggcgttcacccattggttctgctggacctgatagcccgagaagatgccgatgtcgagcatgcagtcgcggtaatcgcgcccgtgggcgatggtgatgtagttgtcgtcgaccatgcggttgtgggtggggtcgagcccgatccaacggccgtcgtggtagatctccacccatgcgtgcgtcgcaccctcgccgcccagcaggcccgcgatgtagcgggcggtcagcccgacgtggcggcacaccgagagcatcacgtgcgcgtagtcctggcacacgcccttgcgctgggcgagcgcctgctcggcggtggtgcggatcgtggtcgaggcgggcgtatacgtgaacgcctgatacacctcgtccatcacctcccatgcctgatcaatcggcgtggcgtcggccggcagcccggcgatgcgcgcccggcacgccgcgatcatggcctcgatgcacggcccgggaatcgtcagcgccgagttgaaccggtacagcggcttgtagatctccgacttgatgtgggcgttgtcgacgaacgcgatgcccttcaccgaatagctgaatatcgtgtgaggctgcgggatgaacccggtcatgaccacggaatcgaacgagtcgatggtcgtctccagttcgacgtccggctcgatggcgacctccacgtccaccacctgctgtcgcgggccgctcgcaggcacgcagcgcagttggaaacgatggtcggtgaccggcgagctgaacgtcagcttcatctcgtagtcaaacaccagtttcttcatgacggcaggctcctcgtcggataatgctcgcaaaaatccactctagtctagcagaaacggcggaggtcatccgtcagctgacggccgccgaccggtcacgctccgatcggcggtctgcccctcacggacgtttggcgtccatgttcatcgcgttgagcatgcccgcgtccttcgggtcgccggtgatggcccggctgttgaagtcggtgaggaactcgttcaggcggctcgtcagctccgggtagccgcggctcggcaactgcccgagtagccagctgatgccggacacgaagcatgagggcaacggcatgccgtcgagcgtgcgcgagtaggtctccaacttggcgagcggcgcgtcgagctcgctattgtccagatggaagcgggtgtacaggtcgatgcgctcgatgtacttgccgatgaacacgaacgccttcagtgtgatgtctgcggtggagttctcgatgccgccccagaacgcgagcatgtcgtcggcgatgtcacgctgcgagtagatgtcatccgcgctggcggaacgctcggcggcctcggtgatgttcttcaccgcgagctcgacgtactgcagcagcctcgacgtcagctccgggcgcagcaccacggcgttgttgaacgcggcgacgatggcggagcgcaccgagtcggggttcgtgccgtcgtagaggaaggagtggatgaacccgtcgaagtcctcgaaatcctgcggtaggtcgagcgccttcgcgaacgggcggaacgcgtccacatcggtgtccatcacgcggtcgtagaaggggaagaactgcacgagtgtcgtgaacgcgcgctcggtgtaccgcccgagccagtacaggttgtcggccttcgacgcggtgaccagcgacagcgagtgccgcttcgaatgcggaatgaggttcaccgaggcgaccgactcctcgcgctgcttgtccgtgctgccgtcttcgggcgccagcacccacgtatccttgaatccgccgccctgcgacgaattgacgatcatctggccaggcactgacgagtagcgcgtcaggccggaataccacacgtgcgtgttctgcccggtgaccacgaacgcgcgcaggtcgcacttgcgcgggctcacctcgccactgtccgggtcgatcacgtcgatgtcgcggaactggatgacctcctgcgcgataaaccggcgcggatcctccttgatgcggtcggccagatcctcccgcgcggccttgtcgagcgacgagccgaacacgacgccgtagcctccggcttccgccacgtccttgatgaccagctcgcccatgcggtcgagcacttccttgcggtccttctcgaacatcggcatgtaggtcggcgcgttgtgcaggatcggctcctcgttgaggtagtaacggaccatctgcggcacgaaatagtagatcgccttgtcgtccgcggccccgttgccgggcgcgttgatgatggcgacgttgccggaacggtaggccgacagcagtccgggaacgccgataaccgagtccgggttgaacgcgaacgggtcgaggtattcgtcggacagtcggcggtacacggcacccacgcgatgccggttgccggcatagtcgaggaagtacagcttgttgtcgacgacttccaagtcttcggggaacgcgagcgccgcgccggtcttctcggccaggtaggcgtgctcgaagaacgccgaattgtagcgccccggcgtgagcacgacggcgatgccttcggtggatacgaagtccatggccttgcgcagcagccgcggatagtcgcggttgtcgcgcacatgcacgtcacggaacagtttgggattcgtacggcgttcgatgtcgcgcgcgaacagcgggtagctggctcccgacgggatgcgcaggttgtcttccagcacccaccagcgcccgtcctcgccttggacgaggtcttcgcctgcgatgtgcgcgaagatgccgccgggaggagtcacgccgttgacttgcggaaagtagccggccgacgtgtacacgtattcttcggggatgacgccgtcgtggatgatgcgcttgtctgagtagatgtctttgaggtaggcgttgagtgcgttcacgcgctgcttgaggccggcttccagctcgtcgaattcgtcggattcgatgatgcgtgggatcgggtcgtatggaaacagccggtcgtggtattcgccgttcttgtatacgccgaaacgcacgccgttgcggctcagttcacggttgatgtctcctcgcctgttgaccagttcctcggcgaattgtcgggctgaccgttctgtcatggcgactccttgtctcacagatacgcatgctgaacgcttatgctctatgatactgaactcgtcccagcgtatgcggccgtggtttccgcattcgctcgaaaaatcgacaatcatgttacgaatcggtcgcgccgcgaacggttcgccggcatgccgaacgtctgccttcgcgcccaccccgcgtctacagcgtgcgcttggcgcgtatacgctcggcccgttcggcgagctcgtcgtcggcgggataggcgacgtgctccagcgtcagcccttgcggcgcgatcggccctgtggagccctcgcgcagcggcacggccatcttctctcggaaccagtcggtcgagcgcttgcccatgccgacctgtatgcagccgccgaccagcgagcgcaccatgttgcgagcgaaggcgtcggcgacgatggtgaagcacagcaggtcggattcggcggccggcgtgcggtatcgctcccccacgccgtcgacgaccagcggccgggtggggatccgccgccaatatgcggttttgacctcgcgaatcgtggtaccgcccggattgggggtggcgaacgagccgaaatcatgcagtccgatggtcatcacggcggcctcgttcatcgcggcgacgtcgaggtcggcgtcgaggtgcagcacgaagccgcgcagacgcgggtcgacttcgctggcacggtcggccacgcgatacacgtaagtgcgttccagtgcggagaatctcgcgtcgaatccgctcggcgcgaccgtcacgtcatggatggtgatgtccgcgggcagcatgcgttgcagacggtgcttgagcgctacggtcggcggcacgctcatgtgcccgacgcagcggctcagcgtttcctcgccgatgtcgagatggcagacctgatgcgaggcgtgcacgcccgtgtcggtgcggccggcgacggtcaggcgcagcggctcggcgggatcgtcgaccggcacgcgcgtaatcgtgtgcagcacccgttcgatctcgccctgcacggtgcgaatcgtcggctgcttcgcccatccgaagaagccgccgccgtcatatgccaggtcaatgcgcaatctcatcacgcccaccagtatatcgacgccgcgccgagtcccctcccccacctcgcgacacccatgtgccgatacactgtgcgcaaatgttggatgtaacggtaaactttgtttatattggagcaaagtcgcaacgaatgcggcgatgcgctaaccaatcaacaaagattccgacaataacagaaacaacattacccacatacccaatggagagattatgcgattgaggagagtgaaagcggccataggcagtgtcctggcagccgtgacactactgagtatgtcgctgaccggcgtcacggcggcgcaagccagcgatgacaatcttgcactgaatcagaccgtaacggccagttcacatgaagtggcgcagactgcgcccgagaaggccgtggacggcaatctcggcacacgctggggcaccgcgcagaacaaggccgcaaacgaatggatcgaggtcggcttgggcggcaccaagaccgtcaagcagatcaacatcgatttcgagcgcaaagatgccgatcagaacatcaccagttttaaagtcgagctgaagcagggcgacacctataccaaggtgtatcagaaggacacccgcgccaagcaacaggagatcatcctgcttgcccaggcgcagcaggcgtccgccgtgaaggtgaccgtactgtccgccgacggcggcaccatgaactgggtcaacgtgggcatcaacgagatttccgtgtactccgcacccaaggagaccgtgctcgacacggccgacacgaaccacatgctcggcgccaccatgaccgcctccagcaacgagacggcgacgctcacccccgacaaggcgatcgaccagaaccgcaccggccgcaacaatcgttgggccagcggctacgagaccccgagcaacatctggctgaaggcggaattcccgcggctcaccgcggtcaaggacatccgcatctatttcttcgagcgtgacgtgaatccgaagcctaccaatgtccagagcttcgacctgtcctacaccgactccgaaggcaccgagcacacgctcaagtccggctacgcgatgacggcctccggggccggttatgtcgctgacgtcgtcatccagctcgatcaggccgtcaacgcccgctcgctcaagctgtcgaacttcgcgatcaagagctccgaatacaacaacgtgagcgtcgccgaatgggaggcgtattcgaacgatcaggccgagccgggcgccacgctcgacagcgtggtctccgacctcgaatccaaccacctgaccatcgagaccgacaccgacacgctggctctgcccactgtgcccgacggctacaccgtcaaattcaacggcgccgactacgagcagctcatcgccgccgacggcaccgtcaaccacccgctggtcgacaagaccgtgcaggtcgcctacgtcgtcaccgacaccgccaccggcaacaccaagacgacctccgacatcccctacgtcgtcaaaggcaccaaccagcagcaggaaggcaacaacgccaagccgaccatcatccccgaaatcgccgaatggcattcgaccagtgccgccaagctggcggcctccgccgtgacgaaggtcgtctacgacgatgattcgctcaaggccgtggtcgacgagttcgtcgccgactacaaggacttcaccggcatcaagctgaccgccaagaagggcgccgccgaagccggtgcgttcaacttcgtcaagaccgactccacggccgcgatcgcgcagctcggcgacgaaggctacacgatggacatccgggccgaccgcgtggtcgccaagtcgtccagcgtgaccggcaacatgtacgcgatgcagacgatcctgcagatgaccaagcaggacgccaacggcttcgtgatcggttcgatgcgcgactacccgcgcttcaccacccgcggactcctgctcgacgtggcccgcaagcccgtctcgctggagatgatgcgcgagatcacccgcacgatgcgctactacaagatgaacgacttccaggcgcatctgtccgacaactacatcttcctggagaactacggcaagggcgacaacgaggacgaggcgttcaaggcctatgacgcgttccgtctcgaatccagcctgaccaacgacaagggcgaatcgcccacggccgaggactactccatctccaagaagacgttcaagcagttcatccaggacgagcgcgccctcggcatgaacgtcgtgccggagatcgacgtgcccgcgcacgccaactccttcacgaagatctggcccgagctcatggtgaagggacgggtctccccgatcaactccaaccgaccgctcatcgaccacctcgacgtgtccaagcccgagaccatcgccaagatcaaggagatcttcgacgactacaccaagggcgacgacccgacgttcgacagcgacacgaccgtgcacatcggtgccgacgagttcctctacaactacacggcataccgtaagttcatcaacgagatcgtcccctacatcaaggacacgaacaccgtgcgcatgtggggcggcctgacttggatcaacgaccacaagacggagatcaccaaggacgcgatcgagaacgtcgagatgaacctgtggtccaaggactgggccgacggcctccagatgtacaacatgggctacaagctgatcaacacgatcgacgactacggctacatggtgcccaacggcagctacggacgtgccaacgcgtacggcgacctgctgaacatcagccgcgtcttcgacagcttcgagcccaacaaggtccgcagcagcggcggctaccaggccgtgccctccggcgacgaccagatgctcggcgccgcgttcgcgatctggagcgacaacatcgacaagagcgcatcgggtctgaccgaatccgacctgtactggcgcttcttcgacgcgatgccgttctacgccgagaagacctgggccgccaccggcaaggagaagggcaccgccgcgaaactcacggcgctggccgccaagcagggaaccggccctcgcaccaacccgtactaccaggccacttcgaagaacagcgtctacgagagctacgacttcaacgacgggctcgccgacgccagcggcaacggccgcgacctgaccatcggcgacggcagcaaggccgccgtcaaggaccagtcgctcaagctcgccggcggctccagctatgccacatccaagctcgacaagctcggcaacggcaacgagctgacgttcgatgtgacgctccagcaggctgccaagcccggagacatcctcttcgaggccgacgctccgtacggcacgcatgacatccgcgtcatggagaacggcaagctcggcttcacgcgagagctgtacaactactacttcgattacgagctgccggtcggcaagacggtcaccgtgaccatcaaggtggaccagcagaccacgaagctgtatgttgacggcgaattcgtgagcgatgcgaccggcaagtacatcgacaagggcatcgagaagaagaccggcatcaccgccgcgaccttcgcactgccgctgcagcgtatcggctcgaagacctctgcgatcaacggcgtcatcgacaacgtcatcgtcaagaagtccgaggccgagacagaccagtacaacaagtcctgctggaccggcacgaccaattccgagacccaatacaacgacacggaaggtctgctgcggtacgcgttcgacaacaacccgagcaccatctggcattccaactggaagggcgccacggacaagctgaccggttcgaactcgttctacgccgagatcgacatgtgccagaagtacacgatcaaccagttctccttcacgccgcgtaccagccaggacagcggacaggtgaccaaggccgatctgtacgtcaaggccaacgcgaacgacgagtggaagcaggtcgccacggatcaggtgttcgaggccagccgcgccaagaagaccttcatgttcgacgagcaggaagtgcggtacgtcaagttcgtggccaagtcctcgaacgatggctgggtcgcggtctccgagttcggcgtggcgaacaagccgtcctccaccgtgcgcgtattcgtcgcggccgatccggccgaaggcggtacggtgagcgtagccgccgagggcgaaaccggcaccgatacggccgtggacgtcgcatccggtgcctcggtgaccgccaaggcggtcgcggcggatggctacaggttcagcggctggttcacgacggccagtgagacggcggtttccaccgatgccacgtacacgttcgcagccgacggcaacacggctctgaccgcgaagttcaccaaggactccacgccggatcccggcccgaagccgaccatcagctcgatcgccgtcaccaagccgaccgtcaccgattacaaggtcggcgacacgttcgacgccactggactggcggtcaccgccacgatgtcggacggcagcacgaagaccctgacggccggcgagtacacgctctcagccacgcaggacggtgccgcggtcgcgcttgacaaggcgttcgccaaggccggaaaggtcactgtcacggtcaccgccaacggcaagaccgccaccttcgacgtgaccgtgacggccaaggatcccgatccggaacccgcgacgctcaagtccatcaaggtcacgtccaagccggacaagaccacgtacaccgtggatgagacgttcgccaagacaggtctcgcggtgacgggcacctggtccgacggcaagacggcgctgctgaaggacggcgaatacaagctgtccgcggtcgacgccgacggcaagaccgtcgacctgaccaagccgttcacggctgcgggcgacgtcaccgtcacagtgacctccggcaagctcaccgactccttcacgatcaccgtcaaggcgaagaccgtgaccccggctcctggcgacaacaagccgggcgagaacaagcccggtgccgacaagccgaagccgaacacgcctgacgaggtcgccaagaccggtgcttcggtcacggcggtcgtcttcagcgccctgttgctgttgtccgcaggctacctgctggtgcgtaagcgcaggatctgaccgaattacgtgtcatcccccgcggatgacacgctgagaccctagagggggctcccggttcacaccgggagccccctcttccgttgcatgcaggtacgtaataacgtgtatatgtcattatcgcctactgttgcgtatctaagtgcgcgcagaaacgacgagtccgcgcacttagatacgcaaacggggctatttgcgttcctaagtgcgcacggttgtcgtttcggcgcgtacttaggaacgcaaccgcatctgatgccaacgcatccgctggcggagggctgtccgtgcaacggactagggcccgtcaacagcctccagtaccacccaacaaacaaaaaacaggggctggaaaccagttacggttcccagcccctatcaatgtctatgagacgggtctcactcggccttgtcggcggtctcctcggcagcggtctcggcgggcgcctcaaccggagcttcagcggcggcggtctcctcgaccggagcctcggtagcggcggcgaccttggtggcggcctcagcttccttgacgacagccttcttcgggcttaccggctcggtgacgagctcgatgacggcggcaggcgtggagtcgcccttgcgcggagcgatcttgacgatacgggtgtagccgccctcacgctgctccatctgctcggcaatctgagtgaacagcacgtgcacgacggacttgttgcggatgacgcgcatcacgcgacgacgggagtgcaggtcaccgcgcttcgcgaaggtgatcaggcgctcggccagcggacgaaggcgcttggccttcggcagcgtggtggtgatgcgaccgtgctggaacaggctggtggccatgttcgcgagcataaggcgctcatgggccgggcttgacgccagacgcgggcccttcttgggtgtaggcatagtttctccttatagcccgtcggattcaggtgggcacatgcccgaacgtccgaatccgacggttatatctgttgcgaaaggtgacgtcactcgtcctcaggcgagaagaacgtaccaccttccaaattgttggtatcgaagcccagcggcgacgacttcagcgacagtcccatggactgcagcttgtccttgacctcgtcgatcgacttcataccgaaattgcgaatatccagcagatcctgctcggtgtgagcgacaagctcgccgatcgtgtggatgccctcgcgcttgaggcagttgtagctgcgctgcgtgaggttgagatcctcgatcgggacggccatctcggggttggtctcctccgcgacgggagcgggaccgacttcgacgccttcggcctgcacgttgagctcacggcacaggccgaacagctcaaccagggtggagccagcggaagccaccgcatcgcgtggtgaaatggccggcttggtctccacgtccagaataagcttgtcgaaatcagtgcgctgttcgacgcgcgtggcctcgaccttgtagcttaccttgagcaccggggagtaaatcgaatcgaccgggatacgaccgatctcatcggtgtcctgcttgttcatctgcgcggggacgtatccacggccacgctcgacggtgaactcgatttcgagttcgccgtcgtcggcgagggtcgcgatgtgctggtccgggttggcgatggtgacaccggcgggcggtgtgatgtcgcccgcggtgacttcgccattgccgctcttgcgcagatacatgaccacgggctcgtcgtactcgctggtcagcacgatgcccttgatgttcagcagaatctcagtgacgtcttccacgacacccggcagagtggtgaactcatgcagggcaccggaaatacgcacggaagtgaccgccgcgcccggaatcgagctcagcagtgtgcggcgcagcgaattaccaagtgtgtatccgaaaccgggctcaagcggctcgatgacgaaacgggaacgctgcggattgatggattcctcggtaagtgtcggacgctgtgcgataagcactgtgtgtatcctttcagcttctggacggtggtgcactcaccttccgtaagcggttttggatggatgagattgctgagtgctcagacgcgacgacgcttcgggggacgaacgccgttgtgcgcttgcggagtgacgtcggtgatggaaccgacttcgagtccagcggactggagagaacggatggcggtctcacgaccggaacccgggcccttcacaaagacatcgactttcttgacgccgtgttccatggccttgcgggccgcggactcggccgccatgccagcggcgtacggagtggacttacgggagcccttgaatccgacatcgccaccggatgcccaggacacgactgcgccggacgggtcggtgatggagatgatggtgttgttgaacgttgacttgatatgcgcctgcccgacggggatcgacttgcgatcacgacgacgaggcttgcgcgcggcctgcttaggagctgccattgaccctcgtttccttgtaacgaactgttgttttggattggatccggacgatgggtgtcaccccgtggcccgaatcgacgccaccctattacttggtggccttcttctttccggcgaccgtgcgcttcggacccttgcgggtgcgggcgttggtcttggtgcgctgaccgcgcacgggaagtcccttacggtgacgctggccttggtagcagttgatctggatcttacgacggatgtccgcgtcgatttcacgacgcagatcgccctcgatcttgtaattgccttcgaggtaatcacgcagcgtaatcagctgctcatccgtcagatccttgacgcgaatatccgggttgataccggtcgcggcaagcgtttccttggcacgagtgcgacctacaccgaaaatataggtgagggcgatctcgatgcgcttctcattggggatgtcgactccggcaagacgtgccattgcgattccttctgtgttcacgcaggtcgtgcaccgagtcttccggtttcccggcccgggcctgcgtacccggggttcagctgttcgctgtgactcagcgccttatttatttgttgccgctggaatctgctctcagccctggcgctgcttgtggcgcgggttcgtgcagatcaccatgacgcggccgtgacggcggatcacgcggcagttttcgcagatcctcttcacgctagggctgaccttcatggttttcctttgcttgtacctatttacttgtaacggtacgtaatacgcccacggttcagatcgtaggggctcatttccagcacaacgcgatcctgcggcaggatgcggatgtagttcttccgcattttgccggaaatcgtcgccagcacgatgtgcttgttctcaagttcgacgcggaacatcgcattcggcaacgcttccactacctgaccttcgacttcaatcacaccgtcttttgccataagccttacagtccattccttgggtgtattacacttgtatgtccgaagacacaccaaatttaaaggatatatcataacgggtcacgacacgccgaggcgtgcatgacccgttataatttcttgctttatccttgctcctgccggcgatacgaccggcagcggcaatcagtcgctcagcgcggcgacgatgttggcctgaatggcgtcgatgtcgccgacgccgtcaatggcgaccagctggccgcggctcttgtacgtgtcgagcagcggagcggtttccttggcgtacgtggccagacgcttggcgatggcctcgggggtgtcgtcagaacggccctgctcctgcgcgcgcttggcgatgcgctgcatcagcacatcgtggtcggcgtcaagggcgacgaccttgtccagcggcgtgccgagctcttcgagcatcgcgtccagcgccttgacctgggaggcgttgcgcgggtagccatcgagaatccagccgttcttggcgtcgtccatggccagacggtccttgacgatcttgttggtgagctcgtcgggcaccagttcgcccttgtcggtgtacttcagcgcctcaaggccgagctcggtcttgttcttgatgttgtagcggaagatgtcgccggtcgagatggcggggatgccgtagtgctcggcgagcagggcggcctgggtgcccttgccgacaccttgcgggcccatgatcagcagtcgcatgtggtctccttggtgaagtgaatacgttatatatgttcgctcccgtaaaagcgggagcgcagaaggatcagccttccttgtggtcgatgccttcgagcaggaagccggtgtactggaactgctcggtctgggccttggcctgacgcagcgtgtcaagaccaacgcccgcgatgatcaggatcgtggtgccgccgaacggcagcttggagttgaggttcagcgccatgatcagcacggtcgggatcagcgcgacgaacagcaggtacacggcgccgaccgtgttgaggcggttcatcacgtagttcaggtaacggctggtggcgttgccggcgcggatgccggggatgaagccaccgtattccttcatgttgtcggcggtctcgtccgggttgaacgtgatcgacgtgtagaagaagcagaaaaacacgatcatcagcgcatacagcgcgatgtaccacaccgaagtggtgttggcgaggttcttgttgatccagtcgacccaggactgtcccgacttgccgaactgcgcgatcagcgtcgggatggccaggatggaggacgcgaagatcggcgggatgacaccactcatgttgatcttcagcggcaggtaggtggaggagccgccgtacatcttacggccgatcatgcggcgcgtgtactgcacggggatgcggcgctggctcagctcgacgaagtcgacgaagacaaggatgaccaccagcacgccggtgacgatgccgaacttcagccaatcgccgttggtgccgttggtgccccaaccgatctcccacagctgcggcaggaagccagagcagatggacatgaagatcaagatggacataccctggccgatgcccttgtcggtgatcaactcggccatccacatgatcaggccggtaccaccggtcatgatcagaaccatgacggagaggttccacacggagttgtccggaatcggcgaggagcacatgttgttgaacagtgcgccggactgtgcggtcaccagaatcgtggtggactgcagcacggccaggccgatggtgaggtaacgcgtgtactgcgtcagcttggcctcaccggactgtccttccttgtgcagcgcctcgaagcgcgggatgaccacgcgcagcagctgcacgacgatggaagcggtaatgtacggcatgacacccagcgcgaaaatggacagctgcaacattgcaccgcccgagaagaggttgaccaagccgatgaagttttcctggctaccgctaagtgtgttgatacaatcctgcaccgtcttgtagttgactcccggcgtcgggatgaacgaaccaatacggtagatgatgatcatggctaaggtaaagaggatcttgttcctcagttccttggtccgaaaggcttggattaacgtcctcacaaggattcctttccgttgtgcgcgcccggcgcaccgaagcaaacagactctaaccgtcgagtttagcgtacggggtctacccgcagacacgctggtgtcatatgtcatatgacgagtcgtaatgacagataaggccctcgcccgcgacatgagcggggagggccttatctcattggtcacatgcagtgttgccgaacaacaatcagttttcggaaacagagccgccggcggcctcgatcttggccttggcggaagcggatgccttggcgcccttcacggtgacggccacggtgatgtcaccatcgccgagaaccttgaccgggaaaccgccacggacagcgcccttggcaaccagcgcgtcaacggtgacctcgccgccctcagggaacagctccccaagagcggagacgttgacaacctggtattccttcttgaacgggctcttgaagccacgcagcttcggcaggcgcatgtacagcggcagctggccgccttcaaagcccggacgaacctgatagcgcttcttcgtacccttgtcgccacgacccgaagtcttacccttggagccttcaccacgaccgatgcgagtacggtccttcttggcacccggggcgggcttcagattgtgcatctgcaggagttcatcttcgttggccataatcagtcagcctcctcaacggtaacgaggtgacgaaccgtgagaatcatgccgcgggtaacggagttgtcctcacgaatcacgctctggccgatcttgcgcagaccaagggactgggcggtcgcgcgctgcttgggcgtgcggttcaccagaccatggtgcaacgtgatcttcaggttagccatcactcaccatccttctgttcagcggcggccttggcctgagcctcttcacgagccttcttggcctcggcgatgccggcggcgcgagcgcgaagcatcgcatcgggggcgacctcgttcagggcgaggccacggcgggcagcgatctcttccggctcctcaagctgcttgagggcggccacggtggcgcgaaccatgttcacggcggtggcggagcccatcgacttggtgaggatgtcggtgatgccggcgcactccatgacggcgcgcacggggccaccggcgataacgccggtacccggggcggccgggcggagcagcacggtgccggcggcatcatggccgatcaccgggtgggtgacggtaccacggatgcgcggaacggtgaacatgtgcttcttggcgtcgagctggcccttggcgatggccgccgggacctcacgggacttgccgtagccgacaccgacggtgccgttgccgtcgccgaccacaacgagggcggcgaagctgaacgtacgaccacccttgtgggtcttggacacgcggttgatggtcaccacgcgatcgagcatctcgtcgccgtggttctcctcacgacggttgcgacgctcgccgcgtcggccttcgccacgctgtccacgacgggacttgcgctcatcattgttgttctcgggtgccgcagtgttctgagtctcttcagccacttgggtttccttcacttcgttgtcgctcacagtgccagacctccctcacgggcgccatcagcgacggctgcgacgcgaccggtgtacttgttgccaccgcggtcgaacacgacctgctcgatgcctgccgccttggccttctcagccaccagcagaccgaccttcttggcggcctcggacttggtgccctcgaagccggcgaactcggcggtcagcgtggaggcgctcaccagggtgtggcccttggtgtcgtcaacgatctgagcgaccatgtgacggttggagcgggtgacgacgaggcgcggacgctccggggtgccgacgaccttcttgcgaagacgagcgtgacgacgaaggcgcgcgaccttcttgcccttacctagaatcttgacgctcatatcacttaccagcctttccggccttgcgcaggatgcgctcgtccgcgtacttgatgcccttgcccttgtagggttccggagcacgcagcttgcggatgttagcggcgacctggccaacgacctgcttgtcggtgcccttgacgaccacttcgttagcgttcggcagttcgaaagtgatgccttccggcgggttgacggtgatcgtgtgagagtagccgagagagaactcgatgcccttgcccttggcgacggcacggtaaccggtgccgacgatgagcaggcgcttctcgaatccatcgtgcacacccttgaccatcgaggcgatgatcgagcggctcagaccgtgcttggcacgggtgggacgcaggtcatccgcggcggtcaggataatctcgttgccttcgacctgagcggtgatgccctcagggatgacgtaggaatcggaacccttcgcacccttggcggagaagttctgaccctcgatagcgacttccacgccagccgggatggtgacggggagcttaccaatatgcgatgccatgtgtcagctctcctttctcaccacacgtaggcgacgatctcgccgccaatgccccggtcgaggcattccttctgggtcatcagtcccgagctggtcgagatgatggcgatgccgaggccaccgagcggcataggcagggagtcggacttcgcgtagcgacgcaggcccggcttcgaaatgcgcttgatgccctggatggaacgctcgccgttcgggccgtacttgagggtgacctcaaggtcctggccgaccttggcttccttggcggtgaagtccttgatgtagccttcgcgcttcaggatctcggcgatgttcgccttgaacttggagtacggcatttccacggtctcgtgctttgccgcgctcgcgttacgcagacgcgtgagcatgtctgcgatcggatctgtcattgtcatgtgggcttgttgccctttctcgccgtggtttccgccgccctagcgcctgcactgcagacgttcgggccgcggaccttcagcgtcgatgtttaccaactggacttagtgactccgggcagctcgccgcggtgggccttctcgcgaaggcagatgcggcacaggccgaacttacggtacacggagtggggacgaccgcagacctggcagcgcgtgtaggcgcgcaccttgaacttcggcttgccggccgccttgttcttaagagcggtttttgccatatcagttctccttgaaggggaagccgaggtgcttgagcagcacgcttgcttccttgtcgtccttggtgctggtcaccacggtgatgtccataccacgctggtgatcgatgctgtcggggtcgatctcgtggaacatggactgctccgtgaggccgaagttgtagttgccctgaccatcgaactgcttgccgttgatgccgcggaaatcgcggatacgcggcagagccagcgtcagaaggcgatccaggaactcccacatgcggtcgccacgcagggtgacgtacgcaccgatggcctggccttcacgcaggtggaactgcgcgacggatttcttggccttggtgatcttcggcttctggccggtgatcagagtgaggtccttgacggcgccttcgatgagcttggagtcgcgggccgcagcgccgacgcccatggagacgacgaccttctggacacgagcgacctgcatggggttggagtacttgaactccttctccagttcaggaacgatgacgtccttgtactgctgcttcaagcgcggagttgccggcgcctcgatagtgctatcggtcatgccagctcctttccggacttcttggcgacgcgcacgcgcacggtcttcaccttgccgtcacgagcctcctgcttaacattcacgccgacacgggtcggctccttggtctccgggtcgaccagcatcacgttggagcgatggatcggggcctccacggagacgatgccggactgctgtccctgctgcgtggcgcggacgtgcttcttgacgatctgcacaccctcgacgatcagacggtcgttgggcagcacgcgggtgacggtgccctccttgccgcgatccttgccgcggatgaccttgaccaggtcgccgctcttgatcttggctaccatgtcagatcacctccggagcgagggacacgatgcgcatgaagcgcttgtcgcgcagttcacgggcgatcggtccgaagatacgagtgcccttcggttcacggccggagccgagaatgacggcggcgttctcgtcgaacttgatgtaggagccgtcgacacgacggtgctccttgacggtacggacgacaacggccttgaccacatcgcccttcttgaccgacccgccagggatcgcgtccttgaccgaggcgacaatgacgtcgcccaggccggcatagcgtcgcttcgatccaccgagcacgcgaatggcaaggagttccttggcacccgtgttgtcggcgacatgaagccgcgtttcctgctgaatcattgattctccttagccgagctggttctccccgagcaccctgcctgcctataccagcgcaggcagggtgtctcgcggagccttgccgaacttgtttacttggcgcgctcgatgatggattcgagacgccaacgcttggtcttgctcagaggccgagtttccataatactcacgaggtcgccaacatgggcgtcgttgtgttcatcatgggccttgaccttcttggtggagcggacgaccttgccgtacagcgggtgggtcgaacgctgttcgagctcgacggtgatggtcttgtccattgcctcggacacgacataaccgcgacgaaccttgcggaagttgcgctctgtagtatcagccatgcttacttctcctccgacttggtctcggtagcctcaggctcctggctgatgccgagctcacgctcgcgcaggacagtgtacatcctggcgatgtcgtgcttgaccgccttgaggcgggcagtgttgtcgagctgaccggtggcagcctggaagcgcaggttgaacagctcttccttggacttcttgaggaagccctcgatctctgcgttggtcttctcgttcagattcttgattgcgtaatcagcggtaccgactgccatcagatatcaccaccttcacgtgcgataatgcggcacttcatcggaagcttgtcgatggcgcggcgcagagcctcgcgagcgacttcctcagacacgccgccgatctcgaacatcacacggccggggtggatgttggcgatccagaactcgggggtacccttaccggaacccattcgggcgcccagcgggtgcttggtcagcggacggtcggggaagatgttgatccacacacgaccaccacgcttgatgtagcgggtcatggcgatacgcgcggcctcgatctgacggttggtcacgtacgccggggcaagcgcctgaatgccgtaatcgccgaaagcgatttcggtaccgcccttggacatgccagagcggcccggacgatgctgcttacgatatttggtcctctttgggataagcatcagctcactccttcgtttccgttgcggcaggagcctcggcggcggcctgggcctcagccggagcggcttcggtcgcggccttctgctgagcgccggcggcacggttgccacggcgcgggcggcgatcgccgcgacggccctgacggttgttgttctgctgcgcctgctgctcttcgaactcacgctcggtcatgtcgcccttgtagatccagaccttcacgccgatgcggccgtaagtggtcttggcctcgaagaagccgtaatcaatcagagcgcgcagggtctgcagcggaacgcgaccttcgcggtagaactcggaacggctcatttccgcaccgccgaggcggccggagagcttgatacggatgcccttggcaccggcgcgcatggcgtcctgctgggccttgcgcatggcgcgacggaaagtgacgcggttggtcagctgctccgcgatgccctgagcgacgagctgggcgtccagcgcggcgttcttgacttcgaagatgttgagctggacctgcttgccggtcagcttttcgagcttggcgcggaccttctcggcctcggcgccacggcgtccgatgacgatgcccggacgggcggcgtggatgtccacgcgcacgcggtcacgggtacgctcgatgacgatacgggacacgcccgcacgctcgagatccttgttcatgaccttgcggatcttgtcgtcttcgagcacgaaatcactgtagcgctcgccgaccttgttggaatcggagaaccacttcgagcgatggctctcagtgatgcccagacggtatccgaacgggttgatcttctgacccatctcagcgatccccttccttgttggcaacgatgaccgtgatgtggctggtgcgcttgttgatacgagcggcacggccctgtgcacgagcacggaaacgcttcagcgtaacgccctcgtccacataggtcgtcttgacgaccaggtcattctcgcggaacggctcaccggccttgtcggccttgacgcgagcgttggcgatggcgctctccagcaccttgcgaaccggaagggccgcggcctggggggcgaacttcaaaatggtaacggcttcggtggccttcttgcctcggatgaggtcgaccatgcggcgagccttgcgcggcgtcacgcggacgtgacgagcgattgctttagcttccataagtcattctctcctttagcggcgggccttcttgtcgtccttcacgtgacccttgaaggtcttcgtgggggcgaactcaccgagcttgtgaccgaccatggcctcggtgacgaacaccgggacatgcttgcggccgtcgtgaacagcgaaggtgtgtccgatgaaatcaggggtgatcatcgaacgacgagaccacgtcttgatgacgttcttggtccccttctcgttctgctcgtcgactttcttctgcaagtgggcgtcgacgaaggggcccttcttgatgctacgagtcatcttctcgatactccctttacttgcggttcttaccattcggacgacgacgaacaatcatcttgttcgaggccttcttcggacgacgagtacgaacctcacccttgccccacggcgaaaccggcggcttgccaccgcgggtacgaccgccgtgcgggtggtcgacggggttcatggactcaccacgggtccacggacgcttgcccatccaacgggcgcgaccggccttgccgagctgaatgttggcgtgctcggagttgccgacctcaccgatggtggcgcggcagcgagcatccacattgcggatttcgccggacggcatacgcagctgggcgtaggcaccgtccttggcgacgagctgcacggcggcaccggcggaacgcgcgatcttcgcgccgcccagcggacggagctcgatggcgtgcacgatcgtaccggtcgggatgttcttcagcggcaggttgttgccgggcttgatatcggccttctcgccggtctcaatggtgtcaccctgcttgatgccctcgggggcaatgatgtaacgcttctcgccgtcggcgtagtgcagcagcgcgatgcgagcggtacggttcgggtcgtactcgatgtgagcgaccttggccggcacgccgtccttgtcccaacgcttgaagtcgatgagacggtactggcgcttgtggccaccaccgcggtggcgggaggtcatacggccgtaagagttacgaccgccggtcttgctgagcttgcgaaccagcgacttctcaggcgtggtgcgcgtaagctcggagaagtccgagacggacgcgttacgacggcccgcggtcgtcggcttataaacgcggatagccataatatagttcttcctttaacttttctcggctaaccttcagttgccaaagatgtcgatcgactggccctcggcaacggtcacgatggcgcgcttctgggaaacacgctggccgaaaccggtgcgggtgcgctggcgcttgccggcgcggttgagggtgttgacgttcgtcaccttgaccttgaagatctcttcgatagcctgcttgatctgcaccttgttcgcgttcggagccaccacgaaggtgtactggccgcgatcggacagggcgtagctcttctcagagacgacaggcttcaggatgatgtcatgtgctggcttgtgaatagcgaccatgatcaggcctccttggcggccggcttggtcttcgcgtcgacgaaggcctcaaggccttccttcgtgaagacgacgtactgagccgtgaccacatcgtacgtgttgagctgatcggcgaagatcgggtgaacggtcgggatgttgcgcaccgacagccactcgttgacgttatcgcgggagaacaccacggtggtgaacttgttctcggtcaccggggtgagcgcggcgatggcggccttggtcgacggggtgtcggtgacaccgaagtcaaccacgacgacgcggccggcgttggcgcgatcggaaagcacgtagcgcagggccgcggccttcatcttcttgggggtgcgctgcgagtagtcgcgcggctgcggaccgaacacggtgccgccgtggtaccactgcggtgcacggatggagccctgacgggcacgaccggtgcccttctgcttccacggcttcttgccaccgccggaaaccatgccgcgggtcttggtggcgtgcgtgccctgacgggcggcagccagctgggccacgacgacctggtggatcagcgggacgtgagcctggacctcgtcggcggtgtggccgaagagctcggcgggcgcctcaacggagccagtggcctggcccttgccgtcagtgacgttgagagtaacgtttgccatgataatcaggctcccttcactgcggtgcggacgaggacgatgccgcccttggggccgggaatggcacccttgatggcgaggacattgttctcggcatcagcggacatgacggtcaggctctggacggtcgcggtcacgtgacccatgcggccggccatgcgcttgcccttgagaatacggctcggagtggcgcatgcgccgacggagccggggcgacgttcgttcttgtgagaaccgtgggtacgacggtaggacttgaagccccagcgcttgatcgtgcccgcgaagcccttgcccttggtggtgccggtgacatccacctctgagccctcggcgaaagcgtcgatggacagctcctggccgggctcgtactcggcggcgtcctcggtgcgcacctcaacgaggtggcgacgcggggtcacgccggccttggcgaagtgaccagcgagcggcttggtcaccttggtgggatcaatctggccgtaaccgatctggatggccttgtagccatcggtctcctcggacttgacggccgtgaccacgttggtggacacatccaccaacgtgacggggacgaagaagccgttctcgtcccacacctgcgtcatgccgagcttgcgacccagcagagccttgtggctacctctttgcgaagtcataacgatccctcctcccttacagcttgatctcgatgttgacatctgcaggcagatcgatgtgcatcagagaatccacagccttgggggtggggtccacgatgtcgatgagacgcttgtgcgtacgcatctcgaaatgctcgcgagaatccttgtacttgtgaggagaacgaataacgacaaacacgttcttctcggtcggcagaggaaccgggcccaccacagtggcacccgcgttcgtcaccgtctcgacgattttcttcgccgattggtcgatgacctcatggtcataggacttaagcctgatgcggattttctgtcccgccattgccgtccgccctttctagcgattcgttgactattaccatcctgctaaagggcaccggcgagcatgacacacgaaaatacttttcgcggccataaccacatcagtgcgtagacatgcaagaagcccgtcgaaacggcccccttgttccacgctcgcttttttgattccaatttgcgagcccaaaacaggcaacttgttaattaaagcaccaggggtacctatagggaattcgggcgtgtcgcacgcccgaatcctgtcatatttcctcagggctgccgcccctcggcgtcgcctaccggcagcccaccgggctaccggccacacggctccgcgggcgtgtcgcacgcccgaatcctgtcatatcccctcagggctgccgcccctcggcgctatctacgtttcgtgaggttgatttggcgcctcgggaacgtctatctgcgtttcgtgaggttgtcagagcacgataccctcggtatcactgccctacggttgttggaatcatgcggttcccggagcgcctctactctgccatcaacccctcgaaatgcagatagcccattattctcgcctctcagtgcgccgatacacctatccgtacgcgattttcaatgggctatcgggaaaggcagtaaccaaacggccccgcgcacggttttcgtgctgtacgatgacaaccgacttgggagagacattcaggctcgccctcgccgcgctgcgttcgacggtcggcgatgcgaagttccgtgagatcgagaagacctgggtgcaggaacatcaggagcagttcgacccgactggtctgaagattaccgcgacttactccgacaagtccacgaaggccatcgacccgaccgatgaggccgtgacctatcattacgacttcgcgaagccgtccggcgcggcgaagatcacggtgacctatgatggccagaccgcatcgttcacggtcaaggtgacggccgatgccggaaacaaaaccggcaacaaccccaagcagcaggcatcgccggtgcaaaacggcagcacctcgacgcagccgaacggcgtgtccaacccgctgtccaagaccggcgccagcacggctccgatcatcgccctgacggcactcgcactgctgacgggcggcgtcaacgcggacaccgtatggctgttcgccgcatggctgcgccgggagcgctcgctgtggggcaacgccgtggccgtgctcgccacatcgatgatgacggtggtcatcgcctcgttcggggaccggctgccgccgttatgcggggctggtggcggccaggtttcgtgcgatgccgtggcgcagtatcggcagggcattcgcgcactgcctgactggcgttcctggactgatgtgcaggcatggtggccggcgtattccgcgccgaaggcggcgttgacggccgcgatcgttttcgcgctgacgcagtatggctcggtgctgttcgccaaaacgatgattcgcgaatacgggaaggatcctacttggtggcctcatgggtgtggcacgcggcgcttgccatcaccgggttcgccgtcaatatgtggctgggtgtcgtcgcggtcgtcctgctgacgcagtcagtggcgataccgctgcgattccgcgggcaacgacggccgaaaccgatgatcgccggagtcaccgaagcgatgtgcctgctactggtgttcatagcggccatcatcatctgtcctcacctggcatagcggcgatccgcctactccttcctatccgactccctccccgaccatagtcccatttcagaggccgcagatgggactttggcgggatgaggtggccgtgttgttcgtgaggcaggtcacagcgcaggcgctcccctatgcgaagcccgcgttgaagcgccccgcgtgctgcattatcgtaatcaccgtgacaaaatcgcaagctgcacagatcaaacccatcacggcgcatcacgccaaccagctgtatcagcacggcacgctggcgctgctggtgcccggactgctcgaaggcaccacgaccatcggcgaactgctcacccacggcgacaccggcatcggaaccggcgaggggctcgacggcgagctcatcatcctcgacggcgtcgcctataaggtcggacaaagcggcgtggcggaacgcgtgccggacgatttcaccatgccgttcgcgaacgtgcatcacgccgcgttccaataccagtgcgagcgccgcgatatcggcctggaggatctcaacaaccgcatcgtcgaggcgaacggccgcgccaacacgttcttctcggtcatcgtgcgaggcaccttcagcttcatcaagacgagggcagtcatcaaacagcaggccccgtacccgactctggtggaggtcgccgaccggcaggcgatgttcctgcggcacgacgtgaagggcacgatgctgggatatttctcgccggagatgtttcatggagccgccgtcgccggttttcacgagcattttctgtcagacgatcgcacgttcggcggtcacgtgctcgacgcggtgctcgatcacggcaagatatacagtcaggtgttcgacacgctggtgcagcatctgccggtggatgatcctgagtatcgcaaccacgatttccggcatgatccgatagccgaggcgatcaccgccgcggagggagacaaggcaggtaattgacggattcagtgggtagtcgcgaagagaagattagtggaggtaatcactgaatccgcgtgaccacccaccggcactacgtgtcacctcccgccagcgggaggcaggaatggcctgaaataattgtgggggccttccgcataggaagacccccacattggttcaatcacctgggatgggtgatgtcatgccatcgtcagacgcgctcggacgcctcttcggtggcggccacaccctcgcgctcgacgcgaatcttgtggccttcggcctgcggcacgccgtagtatgcggccacggcgatgtccttcatgtcctcgatcatcgggatgcgcgggttggccggggtgcactggtcctcgtaagcgcgcatgccgatctggtcgagcacgctccagaagtagtcctcttccacgccgcagtcctggaaggacttgttcatgccgagcttgttgtcgcggtagtcctcgacggccttcgccagattctcgacgccttcggccggggtcttgcccgggtcgatgccgatgatgcgggcgatgtcctggtagcgcttgtcggcgacgtacttgttgtacttcggccagctggtcggctcctccgggacggcaccgttgtagcggatcacgtacggcagcaggatggagttggtgcggccgtgggcgatgtggcacagggcgccgatggtgtgggccatgccgtggcacatgccgaggaacgcggagccgaacgccatgccggccatggtggcggcgttgtgcatcttctcctgcgcgtcggtcttggcgagccccggctcgccgttgacggactcggccaggttgtcccagatgagcttggccgcgtgcagggccatgccgtcggtgaagtcgttcgcgtacacggacacgtaggcttccatggaatgggtcagggcgtcgaagccggcgtcggaggccagcttgcgcggctgggtgcgggccagcaccgggtccacgatggccacggacggggtcagcgcgtagtcggtgatcgggtacttgtatccggtcttgtggtcggtgatcacggcgaacggcgtcacctccgaaccagtgcccgacgaggtcgggatgcacacgagcttggccttctcgcccagcggcgggatacggaacgcgcgcttgcggatgtcgaagaacttctcacgcacgtcggagaaggagatttccgggtgctcgtagagcagccacatgatcttggccgcgtccatcggggagccgccaccgaccgcgatgatcgtgtcgggctcgaactcctcgcgcatcatctcggcgccgcgctcgacggtctcgacggagggctccggctcgacgtagtcgatgattcggaaggtgacgcgattgtcacgggcgcgcagctggtcgatgaccttgtcgacgatgccgagctgctccatcaccttgtcgcacacgatgacggccttctcgatgccgtgcatgtcgcgcaggtacttgatggcgttcggctcgaagtacgtcttggccggaatcttgaaccactgcatgttattgttcctccgagcgatgcgcttgatgttgatcaggttcacggcctggacgttgccggacaccgagttgccgccgtaggagccgcagcccagggtcagcgacggggcaatcgcgttgtagatgtcgccgatgccgccgagcgagctcggctggttccagatgatgcggcaggcgtgcatgcgcaggccgtactcgcgcaccagcgcctcgttgttcgtgtggatggcggcggtgtggccggcaccgagcttgagcatcttctcgcacatctcgaaggcctgctccttgtcgtcggccttgagcacggcctgcaccggggcgagcttctcgtgggtcagcggctcgtcgtcggagacctccttgcattcggcggcgaggatcgtcgcgtcggcggggatctcgaagccggcggccttggcgatgaactgcggggacttgcccggcaccacggagttgaggaccggcttctggccggagccggcggtgcagccgaacatgtactgctccagcttcgccttctcgtccgcgttgacgaagtatgccttgcggcgcttgagctccttgacgagcggcgcgtagacgtccttgtgggcgatgatggcctgctcggtggcgcagatcatgccgtaatcgaagtgcttggagaggatcaggtcgttcgccgcacgttcgatgtccacatcggtatcgatgtaggccggagcgttgccggcgccgacgccgagggcgggcttgccggaggagtacgcggccttgaccatgccggggccgccggtggccaggatggtggcgatgcccgggtgcttcatcagcgcgccggtcgcctcgatggacgggtgttcgatccactgcacgcagttctcgggtgcgcctgcttcgatcgcggcgtcgcggacgatcttcgcggcggccacggacgacttctgggcgcccgggtggaagccgaacacgatcggacagcgggtcttgagtgccagcagcgacttgaagatggcggtggaggtcgggttggtgaccggggtgacaccggcgacgacgccgaccggctcggcgacctcgtctatgcccatgacctcgtcctcgcggatcaggccgacggtcttctgcccggccatgtagtgggtgacgtgctcgcaggcgaagatgttcttggtggccttgtcttcgacgagaccacggccggtctcatcgacggccatcttcgcgagcaccagatgcttgttcagggccgcgacggacgccttggcgacgatgcggtcaacctgcttctgatcgagcttctcgaactcgtcaagggccttgagacccttcttgacaagggcgtcgacctcggcttcggccgccgcgcgcttctcctcggggctcggcttggcgggcgcctcgacctgtgttgcttctgccatgaatactcctcgactagctgtggtttcattccgttgtcgttgccgccatcacctggcggatcatccatccacatgctcgctattgcgcatctgtggcctacgtcacaatctacgtgatatactgcgcaaacgcacacgaacaaaaacgacggcgtttcgtgtttgtttttggtatttatttgttgctatttgttatatttaaccctgttttactgctgatattccacgaaatggtatcttttgttcgctttttgcgacatcgcacaccatcaaacgaatttccacgaaacaacttatataaaatatgtttataaaagttgcactcgtcgacaaacttttataaaattacttattaaaagcggtgtcatgcgtccggcaccacacggaatcgacccagcaacgaggccccaatgacgaccacggacaccgacatcgccgcaacccgaaacatcaccaagacgcgcaacaggcaggccatcatccgccacctcacaacgcacggcaacgtcaccaagcgccagctgcagctcgatctgcagctgagcctgccgaccatcaccggcaacatccgcgcgctcgaacacgacggcatcatcgcccccggccccctgaccgactccacgggcggccgcaaatcccaaagctaccggttcaacccgagtcatcgcaccgcaatcggcgtcaccatgcaccgcaacaccctgcgcctatgcgccatcgacctgcaggggcgccccatcgccaccctctcgcgcacgctcccctatgccaacaccaacgcctactaccagcggatgggttcggcgatcaacgatttcgccgcggagaccgaaaaggcccacggccccgtgctcggcgtatccttcgccatccccggtgccatctcggccgacggcgccgtcatcaccttcaacgactcgaccggagcgaccggcgtcaccatcgacaccgtcgcccagtcggtgcgctacccgcgtcaactaatccgcgaggccgcggccatcgccatgaccgaaacgctgcacgacaccgccatcagcgacgccatatgcctgtacctgaaccgcagacccagcggtgcgctcatcatgaacggccgcctgcaccgcggcccgaacctgtgcgatggcgccatcgaacacatgacgctcgtcccaggcggcaaaccgtgccactgcggcaggcgcggctgcatggccgcctactgctctcccgaaaacctgccggaggactacgagagcatccccggcttcttcagcgtgctggagcaaggcgagacccatcaccgcgagcgcatgaacgactggctcgaccacgtggcgctggccatcgccaacgtgcggtgcgtcatctgcgccgacgtcgtcatcggcggggaggcggcgctgtacctcgaccacgacaacatcgccgacctgcagcggcgggtcacggccctcagcgtgttcggcaccgaccatctcacccttcggctgagccgcagcgacgagaacagcggcgccatcggcgcggccatgcagttcaccgacccctacatggacgcgctgtgcggctggaacacgggcccgcacccgtcctcgcccgctccgacacggacgaaaatcgacaccgctacaatgggtgtatgaaacacgcgatacctcagcggtatgcaatccctcatcgctatgcgacacgaccgggcctgtacttcacggaagacggcggcgccgatgtcatcgtccgttccgaaacagccgatcaggtgtggctctgcatctacgagaaggtcgatcaacccaccgccttcttcaacgacgccatccgcatcttcgatgattcagcaacgccgttcatcaacgaaatacacgagcacgccgtctgcacgcgcatcatcgagcccatgtacgtgcgcgagacgctgttccgcatggatgggccgaactacggcctgtggtacgtgcatcttcccaaggcgtgggacggcatgcgctacgcctaccgagtggacggcgcgtgggatccgagcaaggggctgcggttcaacccgtacaagctgctgctcgacccgtatggcaaggggatcgacggccgcatgaagctgtcgccggccgcgttctcataccagtgcgacgtcagcgaggatggcaaggtgcgcggctccgcgttcgggccgatgagcaccgtcgacgcactgggcaacatgcccgtgtcggtggccatcgacgaccgggacaagaccaagcacgacgccgacccctcgcacccgcacgtgccgtggagcaagaccgtgctgtacgagctgcacgtcaagggattcaccgcgaacgcaccctggctgcccaaggaactgcgcggcacgtacgcgggcctcgcccacccgactacgctctcgtacctgcaatccctgggcgtcacctccatcgagctgctgcccatccaggccaagcaggacgaactgttcctgcaggagcgcgggcggcacaactactgggggtactcgccactcagctacttctcccccgagccttcgtacgccactgccgaagcccagcgcaagggggcccgggcgatccgcgacgaggtcatcggcatggtgcgcgcgctgcatgaggccgggttcgaggtcatcatggacgtggtgtacaaccacacctgcgaaggcggcgtggaagggccgacgacatgctggcgcggtctggacgcgctcttgtattaccggcgtcagaagggcaatatcgggcggcttgaggacaccaccggctgcggcaacaccttcgacttcaccaacacgcacgtggtgacattcgccgtggactcgctgcggtattgggccaagcgcatcggcatcgacgggttccgattcgatctcggcgtgtcgctggcgcggctggacggggacttcaccaagcatcacccgttcctgtatgcgttgcgttccgacctgctgctcggcaacctgaaactcatcatggagccttgggacctggggccgcagggatggaggaccggcggattcggcatgccgttcagcgagtggaacgaccggttccgcgacacggtgcgccgattctggatcaccgacacccaaccgggggcgcccatcggtatcggcatgcaggagatggccacgcgactgtgcggttcgtccgacctgttcgccacggagcccgggcgcggatgcgtgtcctcgatcaactacgtctcgtgccacgacggattcacgctcaccgacctgacccgatacgcggtcaagcacaacgaggccaacggcgagaacaatatcgatggatcgaacgtgaaccactccgcgaacttcggtgtcgaggggccgtccgacgacccggcgatcatccgcaaacgcgagcaggccgccatgaacatgctcggcacgctgatgctgtcgctgggcacgccgatgatgctggcgggcgacgaattcggcaactcgcagagcggcaacaacaacgcctatgcgcaggacaacgacatcacctggctgaactgggactggatgtaccagacccgcaaaaccatgcagatgcaccgcctggatacggtgtcccgactgctgtcgatacgcaagtcgctgggactgtacatcacgaggagttcttcacgcggctcacgcagctcggcctgttcaagccgtcgagccgcgtgcaatggtatctgcccgacggcaccacgccgatggatcgggactggttcgacacgacgatacgcagcttcgcgatgcgactgctctcgcaggatgaagtcgatgtgctcatcgtgatcaacggcgtcgacgaggtacgccggttcaccctgccgagcgactgctcctggcagtgtgactggagttccgcgaccgcggtcggactgcggccggcgccgggcgatcggctgcagcgtatcgccaagaaccaggcgctgcgcagcaactggaccatgtccgtcagcgagaaggacaacatccatcagctattgaagaccattcaggcgtcgctggccgagcaggacaagctggatctgtttggcgccaccacagagcatgccgatgtgctgttcgaggatgacgagcaggccccgggcgttggcgcagatgtttcggcgaccatgtctgcgaccagtaccgtgcatggcgcttccgcgtcggcccgtgatggcggcgacgctacggttaacgggtcggtggtatggacgatgcccgcactcagcatcagcgtgatgcgcaggctgcagtagaggtgctcataacgaacgaggccctttcgggaaacgatgtttccgaaagggcctcgcgatagccagaactggcgtatattaacgcttcgagaactgcggagcgcgacgtgccttgtgcagaccagccttcttgcgttccacgacacgggagtcgcgggtcagcatgccggccttcttcagggcggcgcggttggcgtcacggtcgatggcgttcagagcgcgggcaacgccgagacggatggcaccggcctgaccggtggtgccgccgccgtcaacgaggacgatcgcgtcgaacttgccttcgagcttgagcagcacgatcggggagttgacctcacgctgtagcagcttggaggggaagtactcctccagggtgcgcttgttgatggtccacttgccggtgccgggaaccagacgcacgcgggcgacggcttccttgcggcggccggtgccgtagcccggagcaatcgcggaagtgccggtgccggcacccgcgttggtctcggtggtgtagctggtgagctcctcttcggttgcctgaaccgcggagtcgttggtgttttcagccatgattctctatctcccttcggttcacttggcctgctgcgagacctgagcgatctcgaaaacctgcggctgctgcggggtgtgcggatgctcggcaccacggaagatgcggagacggtccagctgcaccttggacagacggttcttcggcagcatgcccttgacggcagccttgatgatgcgctccggcttgttcgccagcagctcggcgtagctatcgcgacgcaggccaccgggacgaccggagtgcgagtacagttccttgcccatcttgttgccggtcagagcgatcttgtcggcattgatgatgatcacgtggttaccggaatcggcgtgaggcgcgtaggtcggcttgttcttgccgcgcagcagcgtggcgacctgagtggccagacgaccgagcaccacgtcggtggcgtcgatgatgtaccagtcatgagtcaaatcggctggtttcggagtgaaagttttcactggtgtaccttttcttgcttattgtgttccgggcttggactgccgcgctggtcaggcttggcggtttcggcctcattatccgtgggctccctgaaagtcctcgatggcgagtgggaaagcgctttgaaggaccccttagggaaacacaacaatcctctatgataacgccacctttgacatttcgcaacgccacacgacacacttcatcatccggccgaacgacacctcatgtacggccggatggcatgcccatatcgcaccctcagcgcccctgcatgaccttggcgagcgagagcagacgcgtgttggagaacagctcctccagcggcacgacattgcccttgccgtcggccagcgggatgcgccagttcggatattcgttgttggtgccgggctggttctgggcgcggagctctcccacgccgtccacgatggacgccgcgagcagcttgcacggggagccgcgcaggccgcggtacagcgcctcgacgatctcctgctcgtgggctttctcgtccttcagcaggtcggggtcgagatagccgttgacgatcagcatgaccatcatggccttgtgctcggcgcgcgcgttctgctcgaagtcctcgaccgatccttcgatcagtcccaggcgctcgcgcagttcgacgtgctcgtacgcgagatatccggctgcgggcggcaggtcgtgcgtgttcaccgaggcgagcgagaactctcgccaatcctttggggcgcggaacttgccgtccatctgctcgaaccattcgacggcgcaacccagcacctgatgcgcggacagcgacgtcgagacgtggtccggcacgacgcccaggtcctcgccgacgaccacgccgtgggcgcgcgacgcctcaagtgccaggatgccgagcatgatctcggaatcgtactgcacataggcgccgtccttgggcgtgcgcccggaggggatccaccacaggcggaacaggccgaggatgtggtcgatgcgcaccgcgcctgcatgggcgaacatgccctgcaccatgtgacgatacgtgaggtagccggtgttctccagctcgatcgggttgagtggcggctggctccagtcctgcccctgctggttgaagtaatccggcggcgcgccgaccgtggcgcccttggcgaaacactccgggttccaccacacgtcggagccagacggatgcacgccgaccgccatgtcggccatgaggccgatctgcatgccggcgtccttcgcggcctgctgagcggctcccagctgctcatcggcgatccattccaaccagcggtagaagtccaatgtgtcggggaactgtcgacgcagcccctgcacctcgtcgctgttcttgtcgaggcgcttctcccagctgtcggcttcgccggtcggcgcgccccacttgtcgtagcacaggcaccacgtggcgtaggcctcaagcccttcggcggacgtgctcttgtagtcgtcgaacgccttctgacgctcctcgctgcgtccggccttaaaaatcagccacagggcgtgcatcttcacgcgccacatcgaatcacggtcgataatctgcgcgtccccgttcagcggttcggcctgcgcgtgcagctcgccgatctgcgatttcaggtcatcgccgaggccggcatattcctcgatcgcctcgggacgaatgtacgtgaagttgatgaagcggcgggaaatcggcaggtacggcgacggggtgagcggcgctaccggctcgcacgcgtgcagcgggttgaccagcatgaaatcggcgccggtcttgctgtgcgaatcgaccatgagggtcttgaggtcctcgaaatcacccacgccccaggatccggcggaccggatggaatacagctgggccatccagccccacagctggtcatgttccatggccggcagcatcggaatacgctcgggggcgctgatcagcgtggcgtcctgcgtgcggtcgcccacgctgacatgcagcgtatggtatcccatcggcagatccgcgggtatggtgatggatgccgtcgccacgaacttgccgtcgacctcgtacgcctgcgatccgtctccggctcccggctccagcgcaccctggtattcgtcgccgttttccagcgtgatggttgcggagggaatctgcatgataccggtgttgagcagcacacgatcttccttgccgacgacatgcaacacggtcggggcgacgagacgcccgtggcgctcgcgaaggatacggacaacggaatcatcgatggcgtcatcgtcatgggcgtccacgcccaacgcacccagcaacgccttcaggacatcatcatcgatctcgtgatagtcgtcgctcatgccgatgtagctcgtggccaatccaaccagacgcgccagatggatcagcggacgcgcgagacgctccgcactttctgtactctctgtcatattccttagtgtaagcccgcttttgcgcggcacgcttacgtataccgcgaattgcgccagattttacccgcgattatcgcctgatccgccggcggcggacgggtcggaacgaaacggggtcagtacgggggtggcaggagggagcgcagggagggtgtcgcgcaatgatgcgtcacgaggcgtccgaggtccggctcgccgcggctttcgccacttcgggcgaagggtcgtcgcgcaaccggtcgagcgtctcctgcgaagtgccggggttcaacgccaccgcgcgccgcaccatcgtcgcgagaatcgccggggcaccggattcctccgatactccgagccttgacagcacgtccagggtgtcggcgtcaagatcggtgttctgcgctccctccagccgcatcttccatgatgtgcgcttgttgcgcagcgccgcgtcgcgcacctcggggacctcgtccttggtcaggcgccccaccagccagttcttgtcgtcctcgttggccgccacggccctgcgcacgtccggactcgggtccgtcgacagcttgaccaggatgttcgggaacggcatcgtctccgccagcatgatgcgatcttccaacggcgtgtgccggttgccggcgacggcctccagcagtgccgtcgcacgggagaacgccgcctgatcggaacgatccggcaacggacggcgcgcgaactcggacagttccgcgctatcggtggagtgccgcagccgctcatacgtggcggtcagaggctcgaagggcgtggagtcagtggcgctgtcgggctgagactgcgctgcagtctgcgctgtggcctcgcgcaccgtggcctcgtcatcatgtcgttgcatctcgctcatagtcatcaccatacccgaggggtcgccgaaccgaaccatatcttccgcaaagtattgcgttcctgctgacgggtgagctgagtaccgcaaaaaccacccccagtcatgctacgcatgacagcccccgccagcgggggcgattaggaggtggacatgctgcgcataacagcgcgcctgtttagattgcgacgggacggcttatcagttcaccggattcgggcgtcaccgtcgcgctgaacgtctcacgcacgcgccggagaaattcccgctcacgctccaccggcaccaccgtgtccagtacgacacggtcactgtaccgctcattctccagcgcggccccgcaatccgaggcgagttgacggaacacgtcaaattgcgggtactgcagcgctgtcgtgtatctgcggcacgtctcgatggacgccagtctggccaccttgacgcccagcgaggcggcggacgaatacgcgcgaatcagcccgcccgaccccagcaggataccaccgaaataccgggtgaccgtcactgcgcagttcatcagatctccctgccgcagcacgtcgagaatgggcttgccggcggtgccggatggttcgccatcatcgctcatcctctcccgcacgcgaccatcgccgtcgacgcatatcgcggcgtacgccacatgccgggccttggggtgcagctggcgaacggaatcgacgaacagcagcgcctcgtccaacgcatccacatggcacacatcggcgatgaactcggacttcttctccaccagtgcgtcatgcgccggccggtcggacgtgtcaagaacggttttcatcggtgatgttccactccttcacgatgttcttgtcggcgcccatcgaatagatgacgttccatatgcgctggcgcacctgcgcatcctgcgattcggaccagcatgtgccgttgggatggtcgctggagatcgggcaccactggtatgagccctgccgcatgttcgcggtcggcacccagtcgatgcggctgacgcgccatgccccggccacgcccttgcggccggcgaactggatgcgggcggtcacaccctgattgttgacgattctgctggcgggggcgctgaccgtcaccgtgttgccaagcccgtagatgatccacgtgccgttgtagttctcgatgggctgcgcacaatggcatccggcgccgtagatcacgtcgaacgcgccggtgtccgcgagctcatgcgcctcggagacctgccacgaatcggcgtagtcgatgtattcctgcaccgaatgcatggccatggccaccacgtcggcgccctgttcacgggcggccttggccttggcgacggcacggtcgatgtcggactgatgctgggggtcgccggcttcgcgcaggcggtcgacctgccagtcatggtcggcggtcatgccgttgagcgacaccgtgccggtgaccaggccgagcttgccgccgcccgtgggcgagtcgatgaccagcggcttggtggagtcctcctcggtcttgtacgaaccggtctgcgcgatgcccttggacgcgagcgtatcccacaggcgggcgatgccgtcggcaccctgatcccatgaatggttggtggcgtgcgtgcaggcggtgtagccgaccgaggccgcggcatcggcgacctccggcggcacgttgaataccggatagccggtgtagggaccgccgcgtttggcgatcggcgtctcgaactcgcacacggcgatgtcggacgcctggatgtatggcttcatggtttcgaacagcggcgtgaaatcgaacgccgtgccgtcggtggcggcggtgttcgcaccggcgaaatgcttccacaggttcggatggaacagcaggtcgccgttgaccagcatggagatgcagtcggtgtccgggcagtcgggcgaattgccatggtgctccacaaccggttcgggtacggcctgcttgttgtcgagatcgacccgggtcaccgtcgcggccttatccggtttcgcgacgggagcggcggcctgcatatgccgcacgaccagccatccgccgccgacgagcaccgccacgatgaccagcacgacgacgagcgccctgacgggcgaatgcgatgccgtcgtcctgtgatgcccttttccccggatgtgccccatcgtacgctcctcgctcatctcgtcctgatggttctcagtctaacgcccgtcagctactgtccagtaagcggacacgacacgcgcgggcgaatctcccatacgacacaagcacagacgtgcgacacgcgcgggaaaccggcatatgcaatcacattgcggcggcatctttcttactatgtgaacgatgacatcattatgccacggtaaacgaagggggtagaatgactgcttggagacggacggacaatggcgtacctccgcccccccctgcttcgctacaagggacgatacgccttgcccggatgaccggtcgcgcggattatgcgcaaccggctttctcatatcatgaccgcacaaatcccagcggacattcagcttttcgcggcttaccgattccctaccagtcacacagcatcgacccacgcgccggcagctccagcctgctgccataatacgggctgcaatagtcgttcttgacgtccctcgagaaaggcccggaaaaagcaaaaagccccgggcaaacgtccggagcctagtcggcggagacagagggattcgaaccctcgagccgctaaacacgactaacaccttagcagggtgcccctatcggccactcaggcatgtctccatgttgcacattggcgcaacaacatggcatcttaccatcgtcccccggacttcagcaacacggtgtgccgcacgcggtgtcatacggggcctgacgacgggtcaacgcgccggattcgagtcgcccgtgaacgtgacgatcaccgcgacgatcagcagcgcgacgccagcaatttcgcggcgccctgcgctccggcaggccaggccacgcgcgggcggcaaagagattgcgacggccgctccccaaccggtacggcaaggcccgctccatcccggcccggcacggtacgataagggatatgagtaccgcacctagactggccgccgccaaacgcgattgggggcatgacgagaccggctgcacggtgctgcacatcgacatggacgccttctacgcctcgctggaagtggcacgtcatcccgaactcaaaggcaagccggtgatcatcggcaccgggacgcgctcggtggtgtcggcggcgagctatgaggcacggcgttacggcgtcaattcggcgatggcgagcgcccgcgcccgtcagctgtgcccggacggcgtgttcctgccggtggacatgcactactaccggatgatgtctcggcgcatcgtcgaagaggtgttcagccaggtcactgaccggttcgagcaggtttcggtggatgaggcgtatatggacgtgtcgggggcgctgctcgcctggcaacggccgacccggatcggcgcctggatacgacaggaggtcgcctcgcggttccatgtgacctgttcggtgggcgtcgccgcgaacaagctggtcgcgaaaatggcgtcgacgaacgcgaagcctgatggcatgctgctgattcccgtcgcccgtcacgccgagttcgtacagatgatgccgctgcggggcatacccggcatcggaccttcgctggagcggcggctggcggagtggggcgtgaagaccgtggccgacctggcgaagatgagcgagcagacgctgaccacggccgtcggctcgcagaccatggcccacggcctgtatatggccgcgcgtggcatggatgggcgtgcggtgacgccgtacactccggagaagtcgatcggctccgagagcacgttccccgaggacacgcgcgacatgcgacgggtatgcgacctgctgcgccggtgctgcgacgaagtggcgagctcgctacgcagacgcggtctggtggcgcggacggtgacggtgaaactgcggttcgccgatctgagctacaagtcgatgtcacacaccatggaacgcgccgaggacacggccgccgcgctgtatccgcaatctgtagagctactgtgccggatactggggatcgagggtggcgtcgccgccatgcggagccccggcactcccctgccgcgagacatccggctcgccggcatgagcgcgagcagattggcgaggtcagctggttcgaccgtgcagccgacgttggatgacgtgctggaggagaccgaggcacagtccgccggaaccgtcacgcggtcggcgcggcagcgcgacgcggagcaggcgctggacgcgatacgccgcaaatacggcaagggcgcggcgtcgctgggattgtgagccggtgggtgagccgaccaacgtcagcgcgagagacgcctcgccgcgtcgacgacggcatcgtcactcgcggtggcggagaagcgcaggcattccggcgctccgtagaactccccggggctcgctatgatgccgagcgcggccagatcgtccatgtcgcgccagcagtcgcccgacttcgcccgcacccacacgtacagcgccccctgcggcatgcgggcgtcgtatccggcggaccgcagcgcgccgaccagcgtcttcagacggcggcgatagcgcgtccattgggttttcgccgcatcgaaatcacgcaatcccgcggccatcgcggactgcaccggaccggggatgatctgcccgatctgcttgcggtacgccgacatctcatgcaccaggccggcgtctcccgcgatgaacgcggtccggtatcccgccatgttcgactgcttgctgagcgagtacagcaccaggatccggtctgcggtaccatcgcagacggcggtgttcaacgcgcacggggacgtcgccaacgacaccggcgtcgacgcaccgcccccggcaccgtccacgtggaaatcacgcgaattcgacgaccagcacatcagggcatagcactcgtcggacagcaccaccgcgccgatgcgacgcgccgccgcgacgatatcggacagccagccgccggacagcacgccgccggtgggattacacggcgaattgacccataccgccttcacacccggcacatggcaccatgagtcgacatccgagacgtcatcgaccttcagcacgctcgcaccggccagctgcgtgccgatctcgtacgtggggtacgagaccttcggctggaccacgacatcgccctcgccgaggtgcaacagcgaggccatcagcgcgacggcctccttggagccgaccgtgggcacaacgtcggcgttgatggattgcaggtccacgccgcgcacggcacggaaccattcgaagatggcgtcgcgcagatcaccggatccggccgtcaccggataaccgtgcgcgttcttcgcgtccgaggccacggcaagcgcctcacgcacggattgcggcaccgggtcgacgggagagcccaccgacaggtcgacgatgccgcccggcacctgtgccgcctttgtcttgtacggggcgatgcgagaccaatcgtatggcgatgaataagcgtgaaagcccatgctggtcctttcctcgacgtcctccggccggccgtggcgtgtcacccggcgaaggaaccgtgctctatgaaagcggccgccgcacaaggcgacggcctgcagaatgataccgggcggatcagtcctgattctgaggcggcaacgcggccacctgctcgggatcgtggccgatcgggccgtgtgcggaagcaccgccgaaatcaccgacctcggcgaagaaactcaccgcggcatccttgtaccaagcccactcgtcgggcaggtcatcctcgtagaagatggcttcggtcgggcacaccggctcgcatgcgccacaatcgacgcactcgttcggattgatgtacagggaacgcgaaccctcgtagatgcaatcgaccgggcactcgtccacacaagccttgtccttgacgtccacgcacggctgggcgataacgtatggcatgactcctccttggcttagcttgacttaccacagtacgcggcaacggggacgcacggtcacgctcccgccttgctccaccccgcaaaagtcccatctaacgcgcacgagatgggactttgggcggctaacgcaggtccatgccgacgacgaccggctcggggacgaggcggacgccgaacgccgcctccacgccgtcctgcacggcatgcgccagcgccgcgatgtcggaggcggccgcatccccgcggttggtcagtgccagcgtgtgcagcgtggacaggccggccggcgaggattcgtcgaccttgaaccccttatggaatcctgcatgatcgatcagccaggcggcggaggtcttcacgcccgccgtgccatccggcagcgtcgcggggaaacgcggggcgtcctgcggcagcctatcggccgcatcggcgggaagcaccggattcatgaagaagctgccgcagctgtgccggtcgggatcgcgcacgacgggcgtgtccgcgcctgcggccagctggcgacgctgcgcttcgagcgcgatgcgcacgttgacgtcgcgcttggtgccggccatcgccggctgaagataacgcgcggcatcctccagcatccccttggccgcacggaccttgagcacggcgttgcggatggccgcggtctccatgcggtcaccgacctcgactcccagcgccttggcgagctgtccgtaaccgaccgtgccggtagtgctgtgccgcagcgcgaatgtcaccgacagcaccacgtatcgcggcgtcgggaagaactcgccggccggcaccgccggagcctgatacatgctcgtcttgagagcgctcatacggtatccgaatcccatgtcggcagccgcgatgtccagcgtccgcttgtcccgacggtcccacgcctccacggattcgaccgcgcctgcgacttcctgtccgtacgcgccgatgttctgcaccaccgaggcgccgactgtgccggggatgccggacagaccttccacgccctccagcccgagctcgacggtgaacgcgacgaaatcatcccaattgcagccggcttcggcgttgacgtgcacgattcgctcgccgttctcgaccggcgcggcctcgtcgggcacggtgatctgccggcgggcgtcgcgcacgacgacgccattgaacggcccatcagcgaccagcagattggatccgccgccaatcacgcatagcggcagccctttggagtccgcgtcctccaccgcttcaatcaccccgacgcgcgaggtcggttcgatgaatcgggcgatatggccgccgacgccgatagtggtcagatctgcaaaactcgtcatgccctctagggtacacgcgcccgtcccgcgagcggcggccgtgcgacggccgggatgatgaaacgacaaaaacccgaccggtgaaggtcgggcttttacaacaaagacttgataaagctcagcgggtctcgcggtgcacggtctgcttgccgcaacgcgggcagaacttcttcagctcaagacggtcgggcgtattacgacggttcttcgtcgtgatgtagttacgctccttgcactcagtgcatgccagcgtgatgcccggacggatatcggcgcttttgcttgccatgtggttcacctctgtggtcgttgtttaccggtggcttaccggcctttgtagcgagaaagagactcgaactcttgaccttacgattatgagtcgtacgctctagccagctgagctatcccgccagagagccccgagtgagaattggactcacgacctcttccttaccaaggaagtgctctaccactgagctatcggggcgtggcggatagtggattcgaaccactgaagcacgaagcggctgatttacagtcagctccctttgaccgcttgggaaatccgccatggctgcttgtcgaggctgtggcctcaaccggcaacttggctatctaaacacaagtcgccaacttttgcaactcgcgtgtcgcacacggcatgtcgcaagtatttccaaggtatcacggcatctcaccttcgatactcgcatcatgtttttctgcgcaatgacgccgggaacggccatctgaacatccgccagaccgcattgccgcgtcgtttcgcggcgacggcgcaccgggcgcacaacccgcgcaacggttccggcgacggcgcgacggacgtcggacgcgccggctgtcacatggtccgcgagttcggccagatacgcgccgaaatcggactccccttccggcgtcacggcttccagacattcggcgatgcgaccggcaataccgcgctcagtgtcgacaggcgaccatctcacgcccgcgtcccatgccgaatcgcacgcctcgcgccacgccgcacgccaagcccgccccatgccgttcgtcgcgtccggcgatccggtctctccgaccgcctccatcaggccgaaccgcatccggcgtcgacgccggcgcaccctcgatgggcgagcaccgggaccaccaccaagcgcacgtcatccgccatcacgaaatcacgaccctgcatcagcgcccgcgcacgggccatcgccgccacgttgaggctgcctcgcggcggcactccgaaccgcacgccctgcgcgtcacggatcgccgcggacagcgtcattaccgcgagctcaatcacctcgcgggagcacgacagcacaccggcaagtgcgtcgatgatgtcgccgatgaccgccgccgacatggcgggagtgtcgatcgcgatgtcttcgtcagctccgccgttgctttcgatacccgttgcgcgtaccaccccagtcggccccgccgacagtccccgtcagcgggggcggctattgtgcggcgtcccatacggcgcgggacagttcggtgatctggcttggggccacggctgaggagatgtcgttgctcatcaccgcgagcacatacggatgggtaccgaacacgatcgccacgtcgttctgaacggccgccagctcgccggtcttgttggcgaccttcacaccgaacggcacgcccgcgggaatcttggtgcgccgcgtctggccgagcagcagctgcatcatgcgttcgctggcgtttttcgacaccagcgtcccggcgtacacctgagagaggaacgagccgcagtcgcgcgtcgaggtccagttctccaccgcgttgcccgaggccatgccggtcaatgtgcgcagctcctcgctggatgtgaagccgtatcgttgcgcgatcgcggtgacggtggcgatggcggctttgtcgtcgccgttgccgatgcgcgacagcagcccgttcgcagcttcgttcgagctgacggtgatcatctgcttcagcagggcgtccacgttcgcgtcatcggtgatggtgccatgctcgatgccgtcgaacacggccagcatgatgtagagcttgaccagtgacgccgccacgagtttctcgtcgttgactgtgacgtcgcgaccgctttccagatcgatgtaggtcgccgaccatgtgccgccgtactgcgcgagcttggtatcgagcacctgtttgacggcagcgacacgcgtctcactcgggtcgggttctttcggcgctgcgggcgcaggcacggccgtgacctcccgcgctgatcggcttgccgcaattcggacataccatcatgattgcctgcctcatcggaattcccttgtatcgtcttcccttcccgcgcagtctaccaaacgagtgcggccagacataggaaaaccccggcgcatatcatgcgatccggggttccgtgctgacggcgctgtcgtgcagcgttcactcagccaagaatggcgagcacgtcgcgagaggagacgatcaggtagtcctcgccctcgtagtgcacttcggtgccaccgtacttggagtacagcaccttgtcaccgaccttgacgtccatggggatgcgctcgcccttgtcgtcacgacggccggggccgacggccaggacttcaccctgctgcggcttctccttggcgttgtccgggatgaacagaccggacgcggtctgggtctcggcagcggcctgcttgacgatgatcttgtcttccaacggtgtgagcttgatcgacactgtgggtcacctcgtattcttgaaatccaatcgtatggtcccgcgatggaatgccgccattcagaggctgacgatcacttcgggcatcatcccttcgcgctagcactcatcgtagcgcgattgttagcactctgccaactcgactgctaacgctctgagagaaaatcacacgcaatcacgacgagcggcgcgcgagaatcgtctcaaggccggttcccagcgagtcggaggacgcatccggggcatccacgcttgaccgcacctccgtctgatggaacacgtcggtatcgttcaccgaggcgtcatccatgaccgcggcaacggtggcatccgcatccgactgccctgcatcgccgccgtccacggtggcgggctgctcggcaaccagtgcgggaacggccttcgcgacctgcttcgtcgatttgatctccaggctctccggcgcgggcgcatggcggtcgacgccattgcgcggctcgcccagcgagaacgaaatcagatcctgagacgcggccacttcgaaggcgtccaaggccgcggccgggtgcacccgatccagttccgtggtcatgtcgccgcccgagggggcgcccccctcctcgacgaccacttcggcatgggagtccgtgggctccacgacattcgtcgcggactcgtccgcggacggctgcgcgacggcatcctgccgcggctcaggctgcacggccgacgttacggccgcttccggctgttccgatgccgcatccacatcatgccggccgttttcggacgcagccatcgcatgggccttctgcctcgcctcacgggcggccaacgcgcgatcctgctcgatacgtgcgcggtgaagcgcctgacgaatctcccggcgttccatcacgtcggtcttcacttcggtctcggcagagggattcgcggtggcggttacctggtcgccggccgtatcagcgatcgccttcgccgcagacttggtcggagacgcagactttgcctgagacggggactttgctcgcgggcgggcactcgccccggcccgtttcgccagacgttccctgcgccgcgcctcggccagcgcatgctcccagcgacgggcctgactggaggcccgcacgcccaacgccaacacgaccgccagcagcacgcccggaatcagcgcgaacagggcgctgaaatgcaggaccatcgacagcaccagtaccagcaccgtgatcagcagcagcgatagcgccaatatgcgccgacgacggaccgccgcacgccgaagctcgcgaatatgcgccactttcgccgtggtcggcgtcgtggtgctcgtttgcgcccgctgcataatagcccctttcggctgcggcgtatgctcgtcggagaatcgagtaccgctgtcggcatccaccagatgcaacgacgacgagtacctgtcctgacggtgctcggccacctttttcatgctgctgaccgtccgcctgggcagccagccaaccgcgataaccatcagaatcaccagcaccaccacggtgctcagcgactcataacccatgtccttaagaataggagactccccttacgattgcactgattccggcatggcgtgtcgagctatcagacgatggatgaacccgtcgccggcgtcctcggcgaacaggctgtaggtctcatgatcgcgccactgcccgttgacgaacatgtaccggggccgcacgccctcataatgacaccccactttacacgccaccctgcgggagcgctcgttttccggcagtaatgcgatttccatgcggtgcagccgagggccggtcggatcacagaacgcccagtcggcgagcagcgccaccgccatcggtgcgaagccatgccccgcgtaccgctgatcgacccaatacccgatcacaccggtgcgcatggatcccagatctatcgctcccagcgaaatctggccgacgatatgctcatgataatcgatggcgaacaccactccgcggccggtctgctcgttgtgacgcatctgctgcatccactggttgtaggtcatcggcgagccgtgcatgggatcgcctgactcccatggatgcaaccacgcatcgttgcgccaccgcacctcgttccactcctcttcgtcgtccgccgtgatcggccgcagctttatcgggcattgcggaatgccgatccaccgcggcacgcggatggatggcgctgccggctgccggaacacggcgcatatcgattgcaaaacggacacgcacccattgtgccatcgtcgcgtctccgacacggcgcaccgtccgccgatgacggacattcgtccgtgatagaacgtaaccatgaacctttgccaacgccggcagacgaccgatgccgatatgtcggacgatctgcgcaagagacagctgagacgggacgccatcgcgcggcgtaagaccgtgacgcggcaggaacgggacgcggccgcggcggcactggccgaacacattgtgccgttgctggacttggtcggcgtgcaggccggcacgtctggcgttatgtccgcgccacacggccgcggacaccggccgccgaccgtggccgcctacgtgtcgatgggcagcgaaatccccatgcggccgctgctgtccctgctgctcgaccgcgggctgcgcgtccttgtgccgcgcttgggctccggtctggacgtgggatgggctctgctgcccgacatggcctcattgcatggcgtgacctgcgagggaaccggcatggcacaacggccggatgagccggatacgcagacacttggcccggcggcccttggcgatgccgacctgatcatcgtgcccgcgctggccgtggatgcgcatggtgtccggcttggacgcggcggcggctggtatgaccgcgcgctgacataccgacgcggaggcgtgccggtcgtcgccgtctgctggccgtgggaatgcatggcagacgacctgccccgccagtctcacgatatcccggtcgactgggtggtcacgccgcagggagcccaacgcctgtagttcgccatccgcgcaagttcgcggagggaacaaaacgagacgtcgagcggcgcggtgtccgcgtgacgactaggatatgaacggacttgatgcgtatgccgggcatcgcatacgtgccggaatcatataatgagcttcgaccagggaggaaccgtgccaacctatcattaccgttgtaagaactgcggatacgatttcaccgagcagcagtcgttcgaggacgacccgatcaccgtgtgcccccagtgcgggcaagagcaggtgcgcaaggtgtattccgccgtgccgatcgagttcaaggggcacggcttctaccgcaccgacgggcgcggcggctccggcaaataagcagctgccattggcgcgttcgccgtcttccggcggccagtgctcggcccgcgcatgtgcgacacgcccaagatgtggataactgccgagccttcgaccacattttcgtcacggcttgcgcatcggaacaacgttcagtcaccatgcttgcatggtgactttttctatattggagaagctgaagcgccccacgttgcgccaacgtcggatgctgcggctcacacggcggctgatggcggcctgttgcacggccattgcagcattcgcgacactgcaatgcgtgacggcgagcatcgtcacgcaaccggtcgtggtggcggcacggctcatcccacgcggcgcgcgtatcggcgcggaggacgtggagatccggcagatgcccgtatcggatggttgggatacggcgctcgatgcggcgaatcaggcggcgggaggcatcgcgcagacggacatcgccgccgggcagccgctgttcggcaccatagtttcgcggcggccggtggcggaacccggtcagacggtgatcgatgtacgggtcaccggcacggtggacggcatcgcggccggtgatgtcatggatctggtatccggcaccccttgcgacgcttcggctggtacgacttcatcgcgtgacgaatccgcaggcggccggtcatgcgttctcgcgcgatcggccacggcgatggatgccgcccatgacgatgcgatgaccggcggcacgctcatcacgttcgctttgactcccgacgaagccatatcaatcatcaacgcacaggaactcggtccgattatggccgtcactgcgcaatagctgcggttgctcagccgcagcagccacctccagtctcgctgttcgcgcgacaggggtggtcaccacactcaacgtttgtcgttgaagatggcccagtggggtggcagttcgccgaggatgcgtttgtcgtcgtcggcctcgcgctgctgctcggtgcgcatatcgcccggttcgagtttcacgccgtctgcatcgaagcgctcggttccgtggaacacgacgcgtttgtgctcgcgccgcgtacgacgcgaggcactgtacggccttggctccgaagcatctgcggccacatgatccccgtcaccagtagtatcgccgctcatcgcacatccccgtagatctcgccgatgcgcgacacgatcgcatcgacctccttgtccgggttgacgaatgcgccgacactccacacgctcatcaccgaccagcccagcgacgcaaggtcctgcatcaggccgcgatgccgttcgcgcgtggactgcacgctcatgaactgcgcgtcgtcggtcagcacggccagcgcgaacggcttgtcgggcaacccgacgaccatcggaatgtgcaggccgcggtcgaacccgtagtcgacggcggcgttcagtccgcgggaccgcacgcgctccgccagatcattgaacagcacattgttcgaccgggtgatggtcaccggacgcaccacgtggtcgtccagctgctccacccagcgcagcatggcatgcagcagctgcggtccgggctggtgaagtcgctcatcgtccagatcagactcgtcgaacgccgaaacgatatcgagatggcggtcgcacagcgccagcgcatccagcagcatggcacgtccgccttcgccctccagcacgccgaactgctgcagcagacgcccatgcacggtcttcgcgtagcacaacgacagaatcacgtccgtcgactgggccccggcgatctccggcagcgcgacgatgcgcacgtggcgcaggaactgccccatggtcttgttcttcgacgccagcgatttcagttccgcaccgagtcgcgaacggaacgcgtcggtgagcgtgaccacggtcagcgtgtagccgaccggcaccacgttgaaactcgccgcgcgttcggtgatgatgcggacgacctcatcgatctcctgctggctgctctcgaccaatccggtggccatgaccggtgttccgttcgcctcgaccttgtggaaggccacccggccttgcgacggctcggtcgtgacgtcatagcgcacctctccatacccctgggattccaggaacgcggcgagcctgggcgcgcgccgcacggggtgggagcggaccttcacgctcggcagcagctccatcagcgccttcacgctcggcgaggtcacggtggaccggtgggccagaacggccacctgcttcgcgcggcagacgatggtcagcaactggatggccggaatgtgcgcggccgcgtcgatgattgccacgtcggcgagggtcgtcggatcggtgagcgcggcaagcgtggccggggtcgccacgatgatgggcttggccgcggccaggatctcggggtggtcacggcgtatccggctgagcgggatgcgggtcttgccggccagcaccgtgtgcagctggttggattcctgcgtgcgggagaacagcatttcacacaggcggcgcatggattcctgcgcgaccatcggaccgaccgaacgcacgtgttcggtgtccacctgcgcgaaacgatccgcagcggactgcaacgccgacccatcctgattggagatgatcgcggacgcccgcacgatgttctcgaacaccgtggtccaccatgccagctgcagttcggcatccaccgattccaccggcacacggcgcgtgtgcaggtcctcgaccagttcggtgagcccggccgtctggaattcatgttcgagacggcagcgctccggcagtgtgtccagcgcgagatggtcgtcgaacagcgccttcagacgttcctcgacggcgacgaaatcctgcgattccagatcgccgccctgcacggtggtggacagtacggcgtccagcgccgtcaggtcgcgggccagttcctcctgcgtggcgatgatgtcgtcgagtttgttcggcagcaccggccacccgccgtgaggcacgaacatgcgccattgcgcagcctgcttggccacgacctgcagcgcatcgtgcaggttctcgacctgtgcgcccacgcgcagcaggctcttggcctccttgatatggcggcgacgctcccagaatccgatagtggtgccttcggccttgcgttcggccttggacttgctcgactcgatcatcgcgtcgatgtcgcgctcgaagatctccggctggaacacgtcgagcacgcggcgcaggttcttcagcacctgcacctgacggccccactcctgctcggtgttcggtatcgggaacccgcatgtctgcacggtggacgacacctgttcacgggtcaacggcagcaacttgcgcagcagatcgaccacacgctggtagacggtcacagcctcatcctcggacgtaatggaggccttgaaccaagcggtatcctccggtccgagcgtgaattcgccgagctcgccggcacgcctgagcttcgccgcccattcgtccagatgaccgccgatctcacgcgcggtctccttgcgcaaccgcactcgggtggcgggatgcgcgggcaacgtggcgatttcggcgaggttctgtatggtctggtacgcggacacgccccactgcttgtcggtgcagtgcaggtcacccagataccgggtgagacgggaacgcacgccgaccagctcatcggcgatctggtcgaaccgggagctggcgacgccgggctggaatccgaccgcggcgatcagctgatggtcgatgctgtcattgcagcgctcgtccgagacgtcgagcacttggccgctgagctcattggcgctgatggcctgacggaaacgacgcttctgatcggcgatgcacggcacgtacagtacgctgcggccgttcatcacgcagcgcgacgcgatggcggcggcgtaatcggcggtgtcacgcccgttgacgacatcgactccgagcgaatgcccggctgcgaccatatcggccgcgtaccgcacggcgttgtcgacatcgccgacttcgaactcgttgtgcggatcggcgtcgaatgggctgaacgcaggtgcgccggagtccttgagcgcttcggcggcctccttgctgcccgcgagcgcgtccagcaccgtgttgccggtcgccccctcggccagcgtatcgatgatgtgctggctttcggcaagaatcagcgagccggtcgacatgaagcagcccaggataatctgccgctcgatggtgaaatcggggaacaccttctccgcacgcttggtgatcgccgcgaacaccgcggacgtttcgggcgtgccgctctcgtagttggcgccgttgaacagctcccgctcgtcaagttcgacgtgctgctcgcgcatcaccgtcacgaacgcagggttgagccggacatgcccgacgaaccggatcaccgccacatcgccttcatcctgggcgctttgcacggataccggatacagcagcaccggcatggcaccgttgtcccatgtggcgactcccacggtgagagacagttccgcgacgccgctgacgcgcagtttcgcggccttctcgtcaagcacccgctccagtcggcggttcgccgcacgcagcatgccgttgtcgcggaacagcagatccagcgacgcgcggcctcccgcgaacagctgggcgatgccggagggatgcgcatgggtcaaatcgagcttcgccccaagctggttgatgtcctccaatggggacggcaccaatccggcgcggtactgctcatgccattgacgcatgcgttccagcgattggggcgcctgttgcatgctttcgctcatgacccgactcacttccctaccgctttgcggtaactcttgtagccctcattgttctccagcgcggcgtcaatgtccgctttgccctgatcttccagccaattatagaggtcatcgtacagcaatggattcatggcaaggaacggcagcagctcttcgcaattcgcgatggcgaactgctcggtgtagtcttccgtggtcttcgcctggtcagaggtgtacccgttaacttcgattttcggttcagcggcggcaagcctgcctttcgacacgagctcgaacaccgatcccggctcgaatgcgggtcggaacgaaccggtcgagtccgcctcgtcgtcgttcggctgcgcgaaccggcggtgctcttccggaatctccccgtgggcggtgtccgtatcggctttcacgacgccgtcgcctgccacggtgccggcggtgacttccacaccggccgcgttggctgcgacctcgttcaccgcctgacggatgtcatcgtgcgcctcctgatcggatgacgcctgctggaatcggtcgtcggacggctgtccgttcgccaactgatccgcctgctctgcgggcgcggtggactgcccggcctcttcgctgtcctcggcgagcgcgtcggcgaacaggtcgcggggcaacgccaccgccggcttagcatcggcaccggccacgttcaacggcatggaatcgggctcgctcggctcatcgttggtctgcgattgggccgcggtcactacagaatcagatacagcggaatcagccggtaccgtatccgcggcggactcggatgccacggttccagaagtcacggtttcaggcgatgccgtatcggatgtcgcagtctcagtggatacggccgcgtccgcggcatcaacggcacccgcaggcgccgcattctcggaggactcggcggcttccggaaccttggcctcggcatcgctctcagcagcgtcggcctcagccggcgacacggttttggccagcaccgcggcctcaacgggcatggcagcatccgacgaaacggcaagctccgaatccggctcagctgcaccggccgcggaatccgccgccaatccatccgccgtggtcgtcttctgcggcgggaacgtctgcgatgcggctgcattcagctcaccgacacgcttgcgcacggtggcagcgctgatcgcggcggtaggttccccggcacgcaggtcaagaatgtcatccaccgacatgtcggccacatcaggctcctgcttgacggtctccaaagcgtatccgaacaggtcgggcacgacaaacgtgtcgctcaccggctgctccacacgaatgaaatcgacggggacatcgccgaattgcaggcgcatcggtgaagtcggcagcaggaaatcgacgttcggcggcagacgcatgagatcgccattgccccgcaccacatatgacccgttggtcgagcccagatcgcgcacggtgccgccgccgttctgactcaccgcgaaggtcgcatggcgtttcgacatggaccgcgtgccgtccgctatctccaggcgttcggtgccgtcatcgggcaacggccgcaacggcttgcgcccgatttcgatgctgtctcccggcttcacggttttctgatcgatgccatcgattctcaccgtccactgctgtatcgtccgctgatcgccagtcacgtgccgcccttcctttcacgctcgttcgcatactatgtgccattgtgtcatgtcccgctgtgttttcagggattgatgaccgatgaattgacaacattatcgcattgatgccggtatttcggattgtagcgcacaccggtgcggaacgcccatgtcaggccgtgtcaggcgttcacagaagcggtctcggctccggtgcgcggaccgccgcatacgcgcagaccctgcggccgcgtgtgcgacagcagggtctgtgcaaagctgcaatgcgcgggtttcactcccgcgatcattacttgagctcgacggtggcgccagcctcttccagctgagccttggccttctcggcgtcttccttcttggccttctccaggatggccttcggagcgccatcaaccatggccttggcgtcagccaggccagcgttggtgatggccttgacagccttgatgacctggatcttcttgtcgccgacagcggtcaggacgacgtcgaactcggtcttctcttcctcttcggcggcagcgccggcagccggagcggcaacggcgacggcggccggagcggcagcctcgacgtcgaacttctcttcgaaggccttgacgaactcggagagctcgacgagggtcatttcaccgaaagcttccagcagctcttcgttggtgtacttagccatgatggcttcctttcattctggcggcggccttcagcgattgccgtccgcctgatgtgtgttgttttccgattgtggttcatgcggcaagccgcatgagaatcaagctgctttttcctgcttctcgcgcagagcgtcgatcgtacgcacggccttggtaggcacagcgacgaacaggtacgcggccttggcggtcgtggccttgaggtcgcctgcgaacttggagagcagctgcggacgggacatcatgtccgccagcttggtagcgccctcgccgtcgtagacggtgccgtcggcataaccgcccgagataacaagagccttgttggtcttggcaaagtcacgcagcgtcttcgcagcctcaatgaagtcgcccttcacgaaggtgatggcggtcgggcccttgagcaggtcgtcaagaccctcaatgcccgcttccttggcggcgatgcgcgccagcgtgttcttagccacagtgtaggaagtatcgcggcctagcttttcgcgcagttcggaaacctgcggaactgtaagcccgcggtactcggtcaggtagacagcgtcggcgttacggaactgttccgtaagctgagcgactaccgcttccttttcgggcctcttcatggcgttccttcctagatcggccattgatcctgcgaagtcccgcgcgccctgccagggcaataaaaaagccctgcgcacaggcagagcaacatacaaccgtttccggcgagccgtattacgggcacatatttctcaacctgcgctggcttggcgaaccaaacttcgtgagtgcttgcacactccaaccaacggtctatggtttacaagtcatatagaatacggccgcgagcggacaccttcaacccgggcgtgtcgcgaccgtccgcccagcacgagcgccgctccggtaatgcccgccgacagcatggctatgacggccacgacggcatcggagccgcgcagggcatccccgttgccatcggacgaatcgccggcgttcccggcggcggtaccctgcgaggtaaggccgaattccacgccggctcttttcgtggtgccgttctccgtctcgtttgcgatgacccgctcccttccggtggagccgatgatctgcgccgaccggtgcatgacgcctgcgatctgctcggcgaggaaccggtacccgtcgtcattgaagtgaacgccgtcggcgtcatacagctgccgccggttcgcggtcgccgcgtacaggtcgatggtgttccaacgctcgtcacggatcagcgactcctgtacgggatgtaacctgttcacggagttgacggagacatatttggtaccgggggcgacccggtatgagtgcggtgaactcgcgaaatacacgaccggtcggctggcgagatcccggtacaccctcaccagctccttcgcctcggtcctgtacagtgtctcgttccagtaggcgtccttggaatcgttggtgccgagcatgatgatgacgatatcgggggcgaactccttgctctgccggaattcggccgaatcccaatatgaccagcccgtgccccgcagcagcgtgtcaccagcggcgccgaaattgcgcacgtcatagccactgccgaggatgcggccgagccatgccggatatgcggtgtcgcctttcttgccgccactggatttggagccgtccgtaaggctgtcgcccacgcatgcgaccttgatgggcgcggctgcgtgcgcttctccctcgcacggcaccataaccgccaataaggtcaacgtcagcacggcgagcgccgcggcgagcagacggaacggcgaattgcgatgaatcacacggttcctcatgtcgcagacctcgctatcccttcacggcgccaagcattatcaacgccacgctgccaataccataagtttctcacggcaatcgtggccataagtgaggatttgccagcgaagacctatgcggctcgcgtcggtccggaatgttgactaaacaggcggcattccatcgcgacacgcccggagtgctcagcaagatcggcatgccgaatttcatgaaacgccgccatggagccgattcccgcaaacgcacgcgacgattgtgctacgcactccgggcgtgtcgtggtcggaggctgcaaataatcggcccgccggacgaaaattctccgtccgacgggccgaccgccccatgtcgtctcagcgcttggccagtgcgagcgccgcaccggccatgagcgtcagggccgcggcgacgatcggaacgatgccggcaccggtggcgctcagcccgcccttcttgccggtatcgggcttggtctcgtcgcccttgcccggcttgccgtcgccgggcttgccgtcacccgcgccgggcttgccaccatcacccggtccgggcttgtcaccgtcatccttggccttcagcccgtcgatggccgcatcgatggcggcggcgagcgcgtcaacctgcgcctgttgcagggattcgtcggcgtctccggccttcgcggccttcactgcggcatccatcttcgcccacgagtcagccgtgtagtcggccgcattcagcgcctctgcccgcttgattgccgccttcagtccgctgcggtcgatgagaccgttcgcgtattcgacctcgccgagcttgaacttcgcctgcttgatatagcagcggtcggtggtgacgccgccgggccagttctgcgagaattccttgtcccagtgaccgtacgtgtccatgatgaacgtaccgtcgtcgagcaccgctacgcccgcgtagccggtgtcgcccgacttcgcgttgttcgcccagtcctcggccagcaggatgcggtattcgccgtcctcctggttaatgagctggtcgtaggtgccgacccaggccacccagtcgccggcgttccagtcgttgccgccgtcgaaccggttgttgccgttgagatcgtagttgatctcgcggaacgtgaccagcagacggccgtaaatcggatcgtaggcaatcttgtgccgttcgcccgccagcgagccgggcagatccatcggcttgctccacgtctcgccctcatcatcggagtagatcagtgtcgccgggttgttgtgcgactggctgcgcgccagaccgatgatccgcttgccgtcgggagaacggaacatgccgatctcgcacatctggtatgcgctttcgatgctgcgccattgcgcaagatacggctccgattcgctccactgctcgtcgccgttctcgtcgaaagtgaggtacgtcctgaaattgacgtacgcgtagttgtggtagatgcccatccatttctggatgtcgttgccgtcggagtccttgagctgcacgagactcgccatggcgacgatggcgtcgttgttggcgttgtcgtacgtgcggttggactgccagtgccggtattcggtccaggtctcaccgttgtcgtcggaatacgatgtgttccatccgtacctgttgccggcggagtcggtaccccagcccgggcaggcggtgatcatcatgatgcgttcggtgccgtcggccaggttgagcacgtacagggtcggcgtctcctgcgaaccggcccacgacgcggggatgtcggtcttgcgcgtccaggtggcgccgtcgtcgtcgctgatcttcatgatcaacggtcccttaccgtgcccttgcgggaacgaggtgatcagacggccgctcttcgtgcggatcatgtcgggctggccgaagtactggttggacgtgtcgagtgacttgtgcacgtccgtgaccttcgtctggtcgagcttgtactgcggcagcgtgttcttgatggtgagttcgcggctcacgttgacggtcaccatgtcggtgaatccacctccccggacggtaatgaccgccgttccgcgggacactccggtaacggtgccggaggcgtcgaccttggcgatggtcgggtcgctcgactcgaacgtgactgtaccatcgccgtcgccgccctgcaggttggcgacgatggtgtacgtcccgccgatgtacatatcggtctcatgctcggcgaggttgagaccgggcagcagcatgccggccgcgatctcggtgtcggagagcacgcgcttgtagatcttcacctcgtcgatcaggccagtgaagccggggccgccgatcacgtcgatcggggcgacgacatcgtgcatcttcgtccacgtgttcgtcgcgccgatcttcgtgccgttgacgtacatggtcagtccggctgccttgtcctgagtccacgcgatgtaataccacgtgcccggctggaagtcgtaccggaaggtgagcacgtcgccgctggcggtgccgacacggaagccggattcgcggtcggcgtccatcttgaggtcggccgagtacttgccgtccgcgctcgttatcacggccgagcggccggtgagttcggcgtcggaacgcacccagtagccgatcgtccacggatccgtcttcgcgatgtcgttgccgccggccagggtcacgcctttgccgtccgtgaccttgagcgccttgccggacttgccgtcaacgtattgcgccgtggcgtcggcggtgccgttgcgggtgccccaggagtcgttggcgttcgagttgtcgaacgagtagtagtgcagcccctgcgccacgacctgtggcgtcacggtgagggtgatgctcgccgatttcgtcgggtcggccttggatgtggcggtgattgtggtggagcccacgccggcggcggtcaccacgcccttggcggataccgtggcgacgccggtcttggacgagcgccatgtcacggacgcgttcagcaggttcgccggcttgagtgtcgcggtcagctgcttcgccgtgcctagcatgatctcctggtcgccgccgtcgatggcaacggattccaccgtgctcgtgccttgcgccttgagggatatgtacttgtcggtgagcgtgtcgaggtcacccttgaatccgctcatctcattggcaagctgtgtgacctgcgcggcggtcagatacgagtgcgaggtcgtcaccgtcgttctgatcttcgcgtacatcgcgtcggcatcggcctgcaacgaggggatctcggtgaccatgagcctgatcttgttcacgtcgcgcacgccctcggcgatgcgctccaggcgcacggacgacttggacaccttgtctccgctcttctcgctcggataaatcaggaacgggtcgccgggctcgaaggcgttgtgcgtggcgtcgttgagcgggtcggccacccatgcgtcgtacgcccagcgcaggaagccgctggtctgctcgcccgcgttgaccaccgaccagtagctttcgaccggggcggacagcgagaagttgccgggctcatgctcggtgcaggagtacagcgtggtgcgaaggccctttgcctcacgcgcctcgatcagccgggtgaagtcggtgggatgggccgccgccgcggtgtcgccgacgttcaggtcggtgacgcgcagcgccaggtcgaacttgttgacgaagccgtccatcgcgccggcggtcttcaacggcacgtcgtggatattccgtatcgagtcgatcaggtcgaacgcgtcggcgctgaagccgcgctcgtcgatgccgatgtacgactcgtcgaaccagcccttgtccatcagatgctcgatgagcttgcgcaggaagtcggtccacacgctcctccagcgctcggatccgaccgtgtatttctcggacttcatcgtcccgttctcccagtacgtgaagttgccgtgccagggcgcgatgctgtatatcacgatcttgtcgccgatgccgagtcccttgttgaacgtcacccacttgtcgaagtcggtgaagtcgtaggtgaacccgcccccgctcttggtccacttcaccatcgacgggtagtggatggcgttggcgctgtaggtctggccggaccatgcgtcctcgttgatggtggttgtgatggcgtggccgccgatggacttgtacagttccatgcttgatctgaggatctgcaggtgctcgtccgagaacggggtgacgccgtagtattccgcggaggaatacgggtactgccacagttccacgtcgaagttcttctcatactctgccggatcaggcagcgtagcggccttcacctcgatggtgtaggtgaatgtgagcggcgtttccatcccgtctgcggtggcggtcagcgtggtggtgtaggtgccggccttggcgtccttcggtatggcgaacgatacccagatgttctgcacctgattggccttcaccgtgatcgggccgctttggtagaggatgtcgttgctttcggagcggttggtctcggtggcggcgggcacctcgcggttcgggtctccgtagccgagatagctgccgttgtatgccctggtggacttgatgaacgtggccgtgacgttgcttctggcgatgacgtcgccgccctgcgacgtcaggtcgcttgcggtgaccgtcaggttcgagacggtggtgccgaccgcggcgagcgagatctcgctgttgaccttgtcgttcttccacgctttcagcgcccggttgttcgtcgtgagggccttcacctcgtcgaaccgcttctgcgtgtattgcgtatcggggtccacgatgccgccggtcaggttcggtgtcatcctggcgacggtgacgtcgacggtcttgctgatgccggccgcagtcgaggccacggtgatggcggtggctcccggcgcgaccgcggtgaccgtgccatctgcgccgactgtggcgacactcgtgtcgccgctcgtgtaggtcatgtcatcgatggtcgcgtaatcgggcgccaccgtatacgagatccgcttgctgtcgccaacgcccagcgtcatcgaggtcgtgtcgagtgtgacgccggtgaccacgtacggctgatgggtcacgacgaccttggcgcagtcgatcagcgcgttcgtggaattcgtgtcccgctcgcctgtggccaccgccttgaacacgtgctcaccttcgtcaagcccggtgaacgacgcgattttcgtctcgttgatgttggaggcgttgtacaggctgtacgtgcctttttccgctccgtcaatatagtatttcaccttgcccatgggcctgttcttgcctgcatagacgtcgattgcgctgccgaagaatcggaccgtataccagatgtcctccgccgggaggctgtcggatggcgccttggaccacgtatgcacgtcgttgcccggatcccaggcgttgtcggcgaacgtgaagtagttgccgtcgccggtgatcttggtgtgcgagatggtggtggtctgcacgggctcgacggcctgcgcccgcatccccgcgaaatgggggcccatgaccgtcgccagcatcatggataccgtggcgatcacggcggcggcaggtctccatggagagccacgaccgcgcaaccacatagatattcttcggttcatttatggacatcctttctttcacctttgaaaatcggccaccctattgtgtcccagcctttatctttgccagctgtttctgattgtccagtatgccaatcgcgaccttgcgctcagcatccactcagtctatgtgttatgaaagacaacggcctcgatcttatcaggacacaagcttggcgagatcgttgccgtattcgccgagcctcggcaggtcgacctcgcgcccgttgaacggctcctgctgccatgagctgtaggagcatgtcaccgtgacgtccttgccgcgccggtactggctgtcgagcagctggccgctgatgcagatctcgcaggccacgatctgatcgtcgtctgcggacggatcgccgctcaccgtcaacatcatcgtcgcgacgggtggtatagggcagtccgttctgtcccttacatccatcgcattgccgagagagcaaacacacaagacggcacgatacgaatcccggcccccgctggaaaaccaacgggggccgggattcaaggcagggcagatgccattacagcactgccagcaggatgaagttgaggatgaagagcagcgagacaatccagatgatcgggtgaacgctcttggcttccttcttgcaggtcttgacgatgcagtaggtgatgaagccggcggcgatgccgtagctgatcgagtacgcgagcgccatgaacacggcggcgaagaacgccggaatcgcctcggagatgtcgctccactcgatctccttgaggctggaggccatcatgcagccgacgatgaccagcacgccggccgtcgctgcggacggcaccgcggagatcaccggggacaggaagatcgacagcgcaaagcagatggacacgaccacggaggtcaggccggtgcggccgcccgccgcgatgcccgcggaagactcgacgtaggtggtggtgttcgaggtgccgcagatcgcgccgatggaggtggcgatcgagtcggcgaacagggcgcgatccagcttggaggagaagcccttgccgtcctccatgtgcttcatgtcgtcatcggagaagatgccggtgcggcggccggtgccgatgaacgtgccgagcgtgtcgaacgtgtcggacatcgagaacgcgaagatcgtgaccagcacgagcggcagtttggatacgtcggagaacagcgccgggaagccatcggcgctgaagatcacgccgaaggtctgcggcagctgggcgaacgtgtcggagatggacacggagttggacatgctggtcaagcccatcgggatgccgatgatcgcggtgatgacgatggtcagcagcataccgcccttgagcttgagcacggtgaacacgatggcgaacagcaggccgatcaggaacagccacagggtcggggtgttcagcgtggccagaccaggcgtggcgccggtggccaggcccttgccggcggccttggtgtccttcggggtgaaggtgacgaggttgacgttgagcatgccaacgtaggcgacgaagatgccgatgccgccgccgatggcgttctgcagcatgggcgggatcgcctcgatgatcatcttgcggatcttggtgacggtgatgatgatgttgatgaggccgcacaggaacaccatgcacagcgtctcctgccacgtgaacttcagaccgaagcacaccgtgtaggtgaagaacgcgttgaggcccatgccggccgcctgcgcgtacggcacattggcgaacaggcccatgacgagcgtgccgatgatggccgcgatgatcgttgccaggaacacgccgccccacggcatgccggtctggtgcaggatctgcggattgacgacgatgatatagctcatcgcgaagaacgtggtgaggccggccacgatctccgtggacacggtcgtgccgttctccttcaaatggaagaacttctccatactttctctgcttccttgaatgtgcgaggccatccggcctcggcgagacaaactgctattcgcccggtttcccgaacacgcccaccataacatcttcataagtcatggatgttatggtgccggacggcctgtggatatatgtggataacccgttctccatccacatatccacagaaatctcgccgtcggtggcgcgcgggcccccgacccgctagcgttgcgcccatgaacgattacgaaccgataccgggcgagccgacagccaccatgttccagtcattggaacagattaggcggcagactctgcaacgctgcaccgccacggtagggcagtccgaccgccagctgctcttcggcatgaccaccgctctggaactgcaaggcgtgccggtgccctcccactgcaatctcgacacggccgcgctgcatgtcacggtgcggacgcgctccggcaggcctcatattcgaccgttgaaatccgtcccggtcattgtccacatctggagccattgcactccgcaatcactcatccacatatcgaatggcgtgcacgcattgcacgtgtttcatgtgtgggtgcagctgtcctcatatctttcgacagagaatctggttgtgctcggagattccattctcgcgatgctggtgcgcaatggcgcgccggacgcggacaaattgtatctggagttgcagcgtttcataaaagagatgccgccgttccgaggaaaaagcatttgcaggcaagccatgacactggtacgccccaatgtatggtctcccgccgaaagctcgctacggctgggcgttcaacgccacggaataccggatggacgatgcaatgtcgtggttcctggaatcacctttcgctcaggagcagccatttcgctggacatcgcatgggtcgagttcaaggtcggagtggaatatgacggcgatcatcatcgaacggataaggtccagtggcgccgagacaacgaaaaaagggaacggttgcgggcccccggctggatattaatcatcgtgaccgctcaaaatctgattgacgagatgtcgattgcggaactggccctgcgtatagcaagacgactcgccgagcgcggagcgacgatagaattcgaggtcatcgcaatcagcctagaggaactggcgaggaagcacgggtatcggtatgaccgaagacgataggcgtcgaatcatgctatgaccgggaacaacgcgaacgttctcgggtggagcggagcgtgacagtcaagaatgtcgttgtacaacgcggctgttgtacaaggaagctactacccaaaaacgcggaatagagccattctggtttattgattcagatacgaccgcaggacaacgcccgcaaaacaacaaaacgcggcagttgtccagcatcgtcgtcgcttcttctattccggagctccccctcacaaacgcgaagaccccgcgcggaggcggggtcttgtggcgatggacgcgcgggcggatgcaacgcatgcggtccgccagcgcgccgccgatcagccgaaacgaccggagatgtagcgctcggcttcagcgttctgggggttgttgaacatcgtggtagtgtccgcgaagtactccaggtggccgggctcgccgacggccttcaggttgaagaaggcggtgtaatcggcgatacgggcggcctgctgcatgttgtgggtcacgatcacgatcgtgtagtcgcccttgagctcgttgatcaggtcctcgacggccaacgtcgagatcgggtcgagcgcggagcacggctcatccatcagcagcacctgcgggtgcacggccacggcgcgggcgatgcacagacgctgctgctgaccgccggacaggccgatgcccgggttgtcgagacggtccttgacctcttcccacaggttggcgcccttgagcgcccactcgaccaggtcgtcggcgtcggacttggagatgcggcggttgttcaggcgcacgccggcgagcacgttctcacgaatcgtcatcgtggggaacgggttcgggcgctggaacaccatgccgacatcgcggcgcacggcgacggggtccacgtccttggcatacaggttcttgccttcgagctcgacctcacccttgacgtgggcgccggggatgatctcgtgcatgcggtcgagggtgcgcagcaccgtggacttgccgcagccggacggcccgatgaacgcggtgaccttgttgggttcgatgttgatgttgacatcctccacggccaggaagtcgccgtagtagatgttcagatgtttgacgtcaatgcgttgtcccatatgaattcctttattgatgtatatacagtgtacggcggcttaccgttcggacttcacggcgaagacacgagccacgacacggccgatgaggttgaggatcagcacgatgatgatcagcaccagggcggcggcccaggagcgttccatcgggatcgtggtgacgcaggaggagccggcgttgggcgggcagttggcacgcagcttgctgtattcctggtagacgaacacgggaagcgtggtcatctcgccgttgaacaggttcacgttggtgaacgtcgcgtagcctgcggtcatcagcagcggcgcggtctcgccgatcactcgcgcgatggccaggatgacgccggagacgatgccgggcagggcggtgcgcagcacgatcttgcagatggtgcgctgcttggaaacgcccagcgcgtacgaggcctcacgcaggtcgccgggcacaaccttcagcatctcctcactggtcttgacgacggtcgggatcatcagcagcgaaagcgcgacggagccttcgaagccgctgatggtgccggggccgccgatgagcgagaacatcgagtaggcgaacagaccggcgacaatggacgggatgccgctcatcacgtcgaccagcaggccgatggacttggcgagcttgttgccgcgggccgcgtactcgatcaggtagaccgcgcacatcagaccgaccggcacggagatgaccatggcgcccagggtgatctccaacgtaccgatgatggcgtgcagcacaccgccgtatccgccggagggcgtctggctgccgccgacgacgccggacatgttgtacgaaaggaagttgaggttcagtcgcttgatgccgttggcgacggtcgtccacagcacggagatcagcgggatgcacgcgatgatgaaggcgaggcagatcaggctcttcatgaagacgtccttgcgcttgcgggacgcggcgaaggaacggctggtcttgaaccggtcgaagtcgatgtcgggcagttgcttgtcgttgcgtgcggcgggcgtcttcttcacggcgttcgcgtcgacgctgatggtgctctttacagttgcttcactcatcatgcgctcgctttctcggtgatcttacgggcgacgaagttcacgaggaacgtgataacgaacagcacgaggccggtgccgatcagcacgggcacgccgatgttcgggtcggcttccgggtattgcgccgcgatgttcgccgcgatggtctggttctgggatgcccgcagcagcttgatcgagtacgtcaggccgggggaaagaatcatgaggacggccatggtctcgccgagtgcgcggcccaggccgagcatggatgcggagacgatgccggacttgccgaacggcagcacggccagcttgatcatctcccacttggtggcgcccaggccgatggccgcctcctcctgcagacgcggggtctgcatgaagatgtcgcgcgacaccgaggtgatgatcggcaggatcatgacggccagcacgacggcgaccgtggcgacggttcgcgaggggctgtcggcgaccgacgggtcattgagcgatccatcgaagatgtaggtccacctcaggtacttcgcgaaccagttccacaccggctggatggccggcaccagaatcaggccgccccacaggccgtagatgacggacgggatggcggcgagcaggtcgaccacgtagctcagcgcggtcgccagcttcttgggtgcgtaatgcgagatgaacagggcgatgccgatcgagatgaaaaacgcgatgatcagcgacagcgcggagacaagcaccgtgccgaacaccagcgggcccacgtactgccagaagttgtgcgcgcggttgccggtgaatgattcgatggtggcggtgttcgcggcctgatcgcctccgatcagcggccacgcctgaaacagcaggaacaggaacaccgccgcaagcgcgacgagaatgagaatgccggcagcataggcgatcgtcttgaacacgacatcgccggtcttgcctgtactggccggactgtctgccgctttgtcttgcgaactcacaggttctccttcgtatgcattttcaatggtggcttcacggccgtgtacaaccgacagaagccgcagacacctttcattgtgtcaggtgttctgcggcatccgccatacggcgtgtcagctcacgctgatcacttggtcttgatagcctcgatggacttggtgaccttctcgacgatgttgctcggcagcggggcggagccggcagcggaggaggcggtcttctggccttcgtcgctggtcacgtaggtgagccagctcttgacgaacttggcggtgttggcgtccttgtaggcggggcaggcgatgtcgtaggagaccagcacgatcgggtaggcgcccttggctttggtggcgtggttgatcttcacgaccacgcggttgtcgcccttgacggacgtgtcgatctcggaatcctcgatgaccttggaaccggcgtcagcggagatctcgttgtagttctcgccgaccttgatggccgcggtgcccaggtcgccgacctgggagaagtcggcgtagccgatggtgccatcggcctgcttgacggcggtgacgacgcccgaggtgcccttggcgctctgctggccggggatgtcaggccagttctcggagagctcatgggtccaggagtcgggggcctggtccttgaagtagctcacgaagttctgcgtggtgccggacttgtcggagcggtgcacgacggtgatctgggtgtcgggcaaggtcaggtccttgttctggttggcgatggccggatcgttccacttgacgatcttgccgtcgaagatcttggcggcggtgtcggcatcgaggttgatgtgcttgccggcgtcggaaacgcccttcaagttgaagatgatggcgatcggggagatgtagaccggcacgtcgaacgcggtggtgccgttggcgcacgccttgtcggaggactgggtgacctcgtcatcggagagggccttgtcggagccggcccacgcggtggcgccgctcaggaaggtggtgacgcccgcgccggaaccggtcgggttgtaggtgacgttcgcgccggagttcgccgccatgtaggcggagatccaggcttcctcggccgcctgctgggaggtggcaccagcgccggagaagctgccggtaatcttctcggtcgaggtggaaccggagttgttgccggcggacgaagtgttgtcgccacaggcggcgagcgacgccagcatcacgatgccggaaaccgccgcgatggaacgaacgaagagattcttacgcattgtttctttcctcttatcaactgtcatagcggctcgtgtcatacgattcagagccgattccttttcatgacagttactagcctatgagctgttcgaggggccggaagacaaaatcggtaaacagaagatgaatagttgccgaccttgccacgtagttggaatgcgcggtttgcggtatatggttcggcccgcctgcaccgggtggttcaggcgggccgagggcgctttataccgggtgcgggccggtcactgctgcgggctgtcgatcttgtagccgaggccgcgcacggtggtcaggtactggggatgggccggatcctcctcgatcttggagcgcacgcgcttgacgtgcacgtcgagggtcttcgtgtcgccgacgtaatcggagccccagatgcggtcgatgagctggtgtcgggtcatcacgcgccccttgttctgcatgaggtattcgagcagttcgaattccttgagcgggaagaacacgctttcgccgcgcacggtgacctgatgctggccgacctgcatggagatgtcgccgcacaccagcgggatgtcgtcgtcgaccgcaccgctggcctcgaccgcgccctggttgcgccgcaggaccgcgcggatgcgcgcgagcagctcgcggaacgagtagggcttggtcacgtaatcgtccgcgccgatctccagaccgacgactttgtcgatctcggcgcttttggcggtgagcatgatgatcggcacgcggctctgctcgcggatgcgccggcacagtgccgtgccgtcgatgcccggcagcatcaggtcgagcagcaccaggtcgatgccgcccttggtgaacagctccaggccctcctcaccgctggctgcggcggagacgtcgtagccctcgcgcgtcagctggtacaccaagggctcacgatatgattcctcgtcttccacgatgagaatgcgtgtcatgtttacctttcacacatactgtgttcaatgtccgtaccgtcaccatcgtagcgtgttccggcaccgcccgcattcggctccgaagactacgttgcttttccgcgggtttcacgatgggtggccgacgtgccggggagaccgtggcggcgggcctactcctgcgtcgcggcgtcgccggcctccggcgcgccgacggtctcgccgggcgcttcgccgtcatccgcccgctcgccgtcatcgtcatccggttcgggagcgaccggcagctcgatggtgaacgtggagccttcgccctcgcgcgaccatacggagatcgtaccgccgcactcctgcacgcaatgcttggtgatggcaaggccaagccccgagccgcccgtggcccgcgaccgcgccggatcgacccggtagaaccgttcgaatacgcggtccagcgacgccgaggggatgccgatgccctggtcgatcacgcgaatcgtcatggagctcgggtccttgcacagcgagacgctcacgctgaccgtcgtgtattcgggcgagtagcggatggcgttttcgacgaggttcttcacggccatggtgagggtctcccggtcgaccatgatggcgatgtcgcgctgcgcctcgtcgtccgcggcggcgtcagcgtcgaccggcgcctgctcgccgcgcagcgacagccgtatggcgatgtgcttcgcaccggcctgcaccaagttctcgccgacggccgcgcgcaccaccgacatggcggatatgcgctgcgccttgagcatcgccggcgcgtcctgcgcgcgctgcagttcgatcaggtgggtcaccagttcggtcagccgcgcggattccttggtgatgcggccggcgaaataccgcacggcgccagggtcatccgccgcgtcggagacggtttcggcgagcagcgagatcgcgcctgcgggggtcttcagctcgtgggagacgttggtgacgaagtcgcggcgcatccgctcgaaccgacgctgctcggtcacgtcgttgatgaacaccgcgtacagaccgtcgcagatatggccgacgcgtacgcgcaggtagctgtcggagggcgcggagctgccggcggtgacacctcgtccggaaatcgcgctcgacatgcgggtcaggtcgagcgagacgcacatctcgcgttcccgcacgcccccgttctccaccacgacgtgcaggatgtcgaggatctcgtccttgacgatccagccgttctcgatgacatcgacgttcaccgagcttttgctggagcaccgcacggaaccgttgccgtcgcagacgatcacctcggacggcatgacgtcgatgagcccctgttccgcctcgcgcaccggcacgtcggtgccgaacagcgagccggaatcgctcccctgtcccgccagcgtgtcgcgttcgccggactcgcgccccaacgcgtacgacctcgatacggcaatcaccaacacgataatcgtcaccagcaccgccaacgccacatgcacccatgtcatcggacccgtcccgcctttcctcggccctgcaccgctctcatccacccgcaccgatgatgcggatgcggatggtttcagcgtaacggctccgcacgtcccgccgccagcgcgactacgtaagtttgccagttgttcaacttgccgtgtccttccgcggcgcagcccgtcgaagcgagccgcgcccggcgtcacatgcgccgcaggatgtcgagcacgatgcgggccgcggtatccgcgtattcggagatatcgaagcccttgaactcctcgtagtcggtgtcggcgttgtcgctcagcgcgcggatcaccaacgcgggtacttcgtttcgggcggcgacgtgcgccacggatgcgccttccatctcgacggcgtcggcgccggtgtcgtggatgaccttggcgatctgcgccggcgtatcgacgaagtagttgccggacgcgatgatgccgatgatgtgcgtgacgcccatggccgcgagcgcctggtcggcgagggacagcagacggtcgtcggagtggaattcctcgacgggctgctgctcggtgccgggcttccattggccgacgagtcgcatgtcggtgtcgaggtagcgcagtgtgccgccgagcaccacgtcgttgatgtgcaggttccggttgaggttgccggcgatgccggagaagatcaccgcgtcgggatggtatgtgtcgatcaggtgctgggtggtggcggcggcgttgaccagccccatgccgccgacggtcgcgacggcggtgacggtgcctccgtcgttggttcccagcgtgccgcgcgtcacgtcgaggccggcttggcggtcgtgggtgacgtcgttcagtgatgcggcgatgagtgcgacttcgtcgtccaatgcgccgatgatggcgatggtggtcatgggaatcctttccgtgtggttgttcgtgaagagtaatggacgccgtttcagcgccagcgccgggcggacaccgcgtcggcgagctcgtgcagcagccgttccgtctcgtcccagccgatgcagcggtcggtgatcgacttgccgtagaccagttggtcgagcggggccgccggctggttgccgctttcgatgaagctttccatcatgatgccggtgatgccttcctcgccatcagctatgcgccgggcgatgtctcgcacgacctctgcctgccggtgctcgtccttgccggagttgccgtgcgagcagtcgatgatgagcccgtgggtggcggcggattccgccggcatcatcgcgcgcacgtcgtccatcgcacggcgcacggatgcggtgtcgtagttcggcccgtggatcgagccgcgcagcaccacgtggcagtccgggttgccgagcgtctccaccgcgcaggcccggcccatgtggtcgatgccgaagaacgtgtgctgctgcgcggaggcgtagcagccgttgacggcggccttgacggacccgtcggtcgcgttcttgaatccaatcggcatcgacatgccgctggcgagctggcggtggacctgcgattcggtgttgcgggcgccgatcgcgccccagctgaccgcgtcggagatgaactgggggctggtgggctccaggaattccgtggcggcggcgagtccttcgtccagcacgccgatcagcgtcttgcgcgcgagcagcaggcccttgcggatgttgtggctgccgtcgatgtcggggtcgttgatcagtcccttccagccgaccgtcgttcgcggcttctcgaagtacacgcgcatcacgatgagcagttcgccttcggtctccttcatcaccttcgacagccggtgcgcgtagtcgagcgcggcgttcgggtcgtgcaccgagcaggggccgacgatgacgagcagacggtcgtcctgcccatacaggcaggcgcgtatctcgtcgcgcgagtaggcgacgatctcctgcgcggcggagtcaaggggcagttccgccaacacctgggccggggtgggcagcggttcgagctccagcacacggcggttgatgatacggctgacgcccacctgatcctcccagcgcggcacgcccgtggcgagcagcgggttcttgccctcgtccatggcctgccggatggcccgcagctcctccggcgtgttcagcggcttcgggccggcgtgacgcggcgtgccctgcggcgtacgctctcccatgttctgctgctgcatgacgtgatgtctccttgccttgttctctcccccaaggataaggcacggccctgtacttggccatacacgggccggcacacgggccgcgccagcccgtatccgccgcgcatgacgaacgtccccatgccccgcgtcgaacgggcacggggacattacgatgttctggagcgctgccgtctcgccggccgcggcgtccttgtagtcgccggccgcgatcgcgaccaccggcaacaccgccaggatcgtcttccagggagttttgcgccctgagtgccgtgccgattccgccatcacgcgccctccttcaccgacgcgaacaacgtcacgccttcgcccacagttgccgtgcattcatcatgatgagccatgccctttcagtcttctctgacttgcgccacgctgcggtcgcgcactaatacccccctgcccgcgctggcacctatgccaacacgcgccggtatccgcggtgtttctcgaaggagaggaaccaccgcttgaactcttatgcgagcctaacatgaaacgggaaaaaaacgggggcacttgatttatacaagagttgttgtacaatatttcttgtcaattggatatcgcttcataacatgagcgcagcatcacacgcgacaggtgtcatgaggcacggaaggaacggacatggcacaggcttccgacacggcgcaaccgcagacgccgccccgccgcgacaaccccgcgacagtcaccgacgcgaaccgcctgaaggcgctgtcgcaccccacacgactgcgcatactgaccgtgatgagcgacaccgaacccgtcacggtcggccagatcgccgaacagctcggcgaatcggccggaacggtcagctatcacctgaaacagctcgaaaaggccggattcgtcacgcaaacgccatcacccgacggagacaaccgcagaagctactggctggccgcccaaagcaggctggaaatcaacgcggacacggccatcgattcggcaatggcgacgacgatggatcaggtcaactccgcgtttcggcaagaggcatggcagcgatacaggtcggcctctgacaacctgcccaaacagtggacggacccaacggtgatgagcagcagcgtgctgcggctgacaagcgaggaatacgcgcgcatgtcacaggagttgcgcgagctcttcaacacatgggcatcacgcaacctcgcacacgaggagggggacggctcgcaacccgtcatgctcaacatcgacgccttcagatggctgccataacggcggcctgacataccctctcaccccacgccctgcgcccacaatgcaatgggcgagcgcaagcatacgcaatttcacccctcgacgcacaacacccctcaacttattcaaaggaaacatcatgcccgaatcatcgcaggcgcaaaccgcgccacaccgcgaacgcacttccccgcaacgcagtgaatcgctgtggggcaaccccacatatcgtcaatggttcactgcagacaccgcctcgacgatcggagccgcgatgaaaggcttcgcgatctcgctgatcgccttctcgctcacccaatcggtggtgctcgccggatggctcgccacgttcagccaaattgccacgcatgtcagcgacgtgttcggcggcacggtcgtggaccggcacaaccgcaaagggctcatcatcgccaacgccgtgttcggcacgctgctgtggggaacggtgttcgtgctgatcgccctgcatgcaatcacattcccgatattcgccatcgtgacggtcgcggcgtcagcggtcaacggactactcgccaacgcgaccaacgcgatgctgcgcacgatcataccgacccgcgaatatccgaaggcgcaaagcctcaatcaggggcgcgattccgtggtcagcatcgcgggatccccgctcggcggcgtgctgtacgcggtcgcgccgtggctgccgttcgcggtcgcctcgctgatgtacgcgatcagcggtgtcagtgccgcccagctgcgcgtcgacgaacatgtccgcgacatggtgacgacagatcgcaagagcaagcgtcccgacaccgcgtcgcaagcgggctgcacgtccgatgccgccgtcgtgcccgacgccgatgcgacagcagagtcggcgcacacctcgttcttcgaggatttcatcgaaggatggcgctggacgctgcgcaggcacacgctgctggcgatctgcgtaatcgccgcgctggtgaatttcgggctcaacggcgtgttcgccgcggtgaacctgcaactggtgagcacccacgtggactccgtgcgactcggtttcgtcaacaccgtcatgggagtcggcatgctgatcggcgcggtgatcgccgcacgggtatgcgagcgagtgcacatgggcaccggtctggtcgtcctgtcggtgacgtcgctgctgacattgctgccgatgctgttcagcagcgattacctggtgatactggcgtcatcgctgatcgtcgggctgcccatccccaccatcaactcgctgctgatgggattcgtgttcgccaaagtgccgagcgagatgcagggacgtgtcgagtcggcgagcgacatgctgtcgatgatacccacgctgttctgctcagcgctcgccggctccctgctgccacgcatcgggttcggcgccacgattggcctgttcctggccgtgcttgcggtcaatgtggtcatcgcgctgctgatgccgtcgatccgctcgctccccgccgccgaccactgggacgacgcgtcgctgtgacgatgcatcactgaagcagcgccaatgcaaaaaacggttcggcgcggcctctcgaacagacaaggccacgccgaacctacgtatatgctaacagccatgtattgtggcatgccccacctagcggcctaggccgggcaccggatcagagcgcgcgacgcgcgtcgatggcgtcggcgagcgtgtgcagcagctcctcggtgcgctcccacggcacgcaggagtcggtgaccgactggccatacaccagctggtcgagcggtgccggtttctgatgcccgcccttgaggaagctctccatcatgacgccgaggatgcccggctctccatcggcgatacgcgaggcgatgttctcaatgacctcggcctcgacgttctcgtccttgccgcaattgccgtgcgccgcatcgatgaccagaccgcgttcgctcggaccgctcgccttcgacgcgcgcaacgcctcaagcgcggccgccacggaagccgcatcgtagttcgggccggtgttcgacccgcgcaggatcagatggcagtccgggttgcccttcgtctcggcggagatcacgcggccatccaggttgatcgacaggaaatggtgctcgaacccggccgcgaaacacgagtcggcggccggcttgatcgaaccgtcggtcgcgttcttgaagccgatcggcatcgacatgccgctcgccaactcacgatgcacctgcgactccgtgttgcgcgcgccgatcgccccccagctgatcagatcgcagatgtactgcggtgtaatcggatccagccattcggtcgccgtcggcagccccaggccaagcacgtcggtcagcaccttgcgcgccagccacatgcccttgcggatatcgaagcggccatccagatccggatcgttgatcagacccttccagccgatcgtcgtgcgcggcttctcgaaatacacgcgcatcacgatcatcagtcggtcctcaagctcgcccttgagcgccgcaagacgctgcgcgtactcgtgcgccgctttcggatcgtgaatcgagcacgggccgacgatgaccagcagacgatcatcgcgaccgtgcaggatgtcgcggatctcctgacgtgattgcagcaccaggtcgctcatatcatcggtgagcggcagttccctgagaaaataccgcggtgccggaatcgggtcgagctggcgaatgttcacgtccaccgtttcagggaacacggcattcccgcccaaatgccgctcgtcctcggaactgtccggaccacgaagccctgccatcgctctgctctccttccgcaccgcaggccggcgtctttcgacccgcgccctcacgtcgcataccaataccgaacacacaatagtagatgccgtcggaatacggaaaacaacggctgcaatgcgggcacggcggagctgcgaagccgtcacccggcgaaagtcccattccggcggctgcggatgggactttcgcgggatggagatggggcgctattcgcaggcgacgccgtcgccgtcgcgatcgagtttggccgagtagccgggctgccctttgtatagcggagctttgccggctgcacgcaccgcggcgcagttcttgtagtagacatcagaactgtcgccgtcaggcggagcggccggctccaccaccgtgctcgactcggactgttcgcccgatgaaccgtcctgcgatgagctgccttgcgacacgtcctcctgcggcgccactgattccgcgccgtcgccggtcggaacggtctgggccgggcaggacgacagcacgcgcgacatcgcatcatgctcggcctgcgtcacccacagcgagtacttcgccttcacaccgatctgccgagccacgtatgagcagcggaacgatttgttggcgggcagccaggtcgccgcgtcgccgtcggacttgcgctggttcgacgggccgtccaccgcgagtaggttgtacgggtcattcgccagctgcttgcgccggtcggcgatcagctgctgcgcgcccttctgccatgcgtccgacagcgccaccacatgatcgatctgcacggccgccgaggtgctttgcccgcgcacgaaatcaatcaccgcggcggtgtacgggtcgacgagccgaccgctggtcaccacgcaattgtgcgtaccggccttgtaagtcttgttggtgaggtcacggttgaggatgtcgttgcgcgtgtcgcacccgttgtggtcgacgtcggcccatgccgcgccgaactggtcgcgcgaataaccggttttcggtgcacgtcccttgaccggcaacgtctccagcacgctcgtggcgagctgtccgccggacgtggaagccgagcttgacggttcggacgactcagccgattcggattgtccggacgactgacgctcagccgaccccgcatcggagccgggagttccgcatgcgccgacggtcaacacgaacgcgatcgggataagacacgtcagtattcgattgaatgtattgaatgatgtgcggcttccggccgacgctttcttcatcatgcagctttctctgggcttattccgctatgccgcaaccgatgcgcggtcctctggctagaaacatcattgtcatccaacaatagcggaagaccgccgtcaatgacgattccccacatcgaacggcacattcctttcgtaaaatgtccatccgacacggggaatcgacgaaatcggtcattcagtctcgtgctcgacgcacgggccgatacctcgctcaggccagcgcacccatcggatcccatgcggggagcatggtggcgggctcggcgagcgcggcctgatactcggccgggagcatcgccttgggcacggccacctcgtacacgtactcggtgaaccagtcgtcgctcatcgtgaagtagcccttgtcggcaatcttgtcgccccaggagttctccacgcgccagcgacgggtcgtggtgccgtcatcggccacgtccacgccgacgaacgccatcgcatggttcatcgcggagtcgccgaagcgtacgcgcgactccttgtccatgtcgaagtccacatcgtagacgctgccgtactcgaacaggtcagtcgcccacgcgccgcgctcgcgatccatgaacggaccgcagtccgcgccgaaccacaccgggatgcccttttcggtcaggatcgcgcgcacgcaatccttcatgaactggttcggcacgttcaggtactcggtcgggttgccgccggccacgttgcccaggtgctcgatgccgatcttcttgcccttggcgtgctcgcggcgcggatcgtccacgaggcacacgtaatcctcaaggtcggcggtgcccacgtacttcttccagaactcgacgggcgtgatttcgccgtcgcggtggaacatgccctcggagtcggtccactcccagtcgaagctcttcggcggctcgcccaggtgaatcgtcaggatgcggtggccggcggcgacggtcttggcgacctcgtcgtcgatcgacgcggggtcggcgtacatgtgcgccacggcagtgtgcagcaggtggcgcagctgcgtgttcatagcgcccgtgttcttcgaggattcggtctccgggaacaggtccttcggcacggcaccgtacttcttgtacacgttcagcgccatcgtccactgacctccgtcacccatcacgtcggcgagcaggtgctggatcaggcgcgagtcggacggctctccggcacgaaccagcgcggcgacgtcctgcaggaagtagttgacgcgctccagcttgtcgaagtacatcgcgtagttctgggagaactcgaactccttgacgccgaggttcttcttggcgacgaaacgagccacattcagcgagctgaacagccagcagcgaccggaacggtcctgatgggtgacctcgccgttgtcgacggtgacggagaagcggcgctgcagcagacgggaacggtcatagttcagcgcgaccttgtcgataccggcggcggtgacggcgttcatggccagacggttggactggctggtatcgaatgatgcgaccagatcattcagctgctcgccggacagcggtgtgatttcagacgatgacgtgttctcggtcatgctgctcctttgacttgggacgtgcgcggccggttttgtggccgcaatgaaacgtggcatccagcgtttgaccggatgccacgacgggtctctaatgagtgtagcggcgacagcggattcccgccatcgaaccggttcaataccttgattcggcaggagtccggcgacttctgcagccgcctgcgggccggacggcgaagcccggcatccgacgcttcgggatcccggccgactgctattcggcggtttcggcctcgccggcctcggtgtgctcggccgagcgctcggccacatgctcggcgaccggctcggcggcgaccgcttccgcatcctgattgtcggcatgctccgcgacggcatgcgactcatacgccggtgccggctcatcctgcgcggcggcattgtacagcggcacatcgggcgctccctgatgcgacgcggcgccaggctgctccaccccctgctcgttcatgaacccgaatccgctgaacgccttggtaaacatcgaacgcagctcggacacgcgctgcgtgatggccgcctcacgcgattgcagctcggcgatgcgcccctgaagatcctccagctcgacctgcgcggccttgcggcgatcctcgatctgcgacgccgcatcctcgccggccttttccaggatctgcgcggcctgatcgtcggcctccttgcgcttgctcgccgcatacgtgtcggcatcctcgcgcacggtcttcgcctggccgatcagctcgtcggattccttcttggcggccacgcgacgctcttcgaggttttcgagcagctcgctcaccttcttggtcgcttcgtcctgctgggcggcgatgtcagtgcgaatctgctcgacctcggcgttgacctggctcatcgtctgcgtgtggcggacctcggcgtcgtcgcgaatctcctgcgccttcgccttggccgcatcgataatctcgcccgccctgcgctgcgcgtcggccatcatcttggacacctgctcgcgcacgtcggacagtttcttgttcgcctccgcgagcgccgcctgaatctggtcgttggactcggacttgagcttggcaatctcctcgttcgcgctcctgcgctgcgaggcgatctgctgggtcgccttcgcctgcatctcggcgatctcacgctcctgcttggcgcgctccgacgccatgcgcttttcatgctcctcgcgcgaattggtgagttcgagatcgacggactgacgctgctcggtcacgatcttcgccgtttcggcgcgcagctgggcggcgtcctgctgcgcgctggtcgtaatggtctgcgcctgattggtggcgttgccggtaatcgtatcggccttggcctgagcgtcatcgagaagatgctgcgcatccagcttcgcgttgttgatcagcgtctccgcctgagccttggcggacgcgcgagtcgaggcggcatcctgcttggcacgctccagcagctcggtgctggtctgctccgcggaggcaagcatctgctgggcgttggcgcccagcgaggcgaacgtgtggttcttggacgactgacggttgcgctcctcctgcagcttcgcctgcaactgcagcagacgatccccatcctgcttgatctgcgcacgcaacgcggccagcgtctgctgcgcgctggcaaacgcccggtccacctgctccttatcgtatccacgtatcacaatcgggaactggtccgccatgttcggttcctttcgccattacacctgctcgttagcacaaccacacacgactgtaccgcatggcgtcaagcccacgccagaaacgcgacgaaccatacgcgaacgtacacacatgccagcaagaaaccagctgcatcccagcaaaacgtcaggcgatgagaatatccccggacgacggctgcagataataacggaccgtctcgcgcaccacatcgcgcccagcacgcacctgctggcgcagatccagaccgttctgcagcctgctgccgccattgatcggagggaagctgacgaagccggccagcacacgatcctgtgtcgccgtccagtgcagcagctggtagaacagcgaattgcatacgaacgtgcccgcgtcggaactgagcgtggcgggtatgccgtcgcgcgcgaaatcgttgatgatggcccgcaatggcaaacgggtccaatatgcggccgggccgtccttgatgatcggctcgaaccgcggcagcgcgttgtcggcgtcggggcgggcagcgttcatcaggttcgtggcgcagcgttccatcgccacgctgtgcgccgcatgcttgagaccggtcgcgatcacgatgtccggccgggtcgcatccaaggtctccagcaacgtgggccaagcgttggcgaagctgaccgggagcgccacggtgttgatggacacgttggcgtcatgcagcggatcgtccacgtcggacggctccccgatgccgtcgcggacgagcgcctcgggcacttcgtacgacgggttgacgtcgatgttctcgtagtggtcgaacccacaaatcacgacattgagctgctgcatgatgccagtgtaccccgcgaacgtctgccgctgctattgctcgcggacctgggcgaacacctgatgcatccgttcgcgtgcgagacgcttgcggatctccagcgagatctgctcggcctggggcaggtcgtcgcgcgtggtgatcttcatgttggtccgggagccggccacgatggcgaccgggacgtcgggcaggtagtcgacgaccacgcgcgtatcatcggtcgggtggaaatcggggtcgcgcgaggctagctcgtatgcgcggcggatggtctcgaaccggaatgcctgcggagtctgcgcccggaacatgttcgcgcggtccgggacggagcgcacgaccttgcggtcgcccagatcctcggtgagcagcatcgtgtcggtggaggcgaatgcgactgtggctgcctcgaactcgtccagcgcggtgatgcagccgtcgatcgaggactgctcgacgaacggacgcaccgcgtcgtggatcagcagtttcgcgcggggcgggatgccagctgcccccagcgcctgcagagccgccgcagtgctgtcggcgcgttcggcgccgccgtcgatgatcatgcgcaccttcgggtagccggcctcatcgaccaggcgttccacttcatcgcgcacctgcgggttgacgacgacgatggtgtcggtgacatgcgggttctgctcgaacgcctcgatggaccagcagacgatcggcttgtcgtcgacgctcaccagctgcttggggttgtccggatcgaagcgcgtgccgaagccggcggccaataccacggcgacgaccggtgcttcgggttctctgtcatctctctgagtcataccgcccaccgtatgccccgccctgcccgggtgtgacggaagccacactcttctgcacggaattttttctgattcgacgacgaacaggccgccaacaccggtgtcggccccgccgcaacgggctatctcgctttcgaggggttgatttcggctccgccgaacatctatctgcgtttcaaggggttgcccaaacacgataccgcgagtattaagcgccaaacgccattggaatcatgcggtttagggccttgggctacttggccatcaacctcacgaaacgaagatagatgttcccgaccggtggaatcaacctcacgaaacgaagatagcggcccgattcgtcacaaccgaggcaaatcggggtcagccgcgcatgatcagggcgagcaggcgtccctcgtgcgtcttgccggcgagcgaggcgcggcggtgggagtaccacagcgggttctccagcgtgcacatgctgtggcgcacggtgctccagcggtcggcgagcgcaggctcgccttcgccgtcggcggcgcacagcgaggcaagctcctcgtcttcatacaggtattgggaggcggcgttgacgcgcgggcgcgagtcgacgatgctgtcggcgggaacacccgccttggcgagctccatgcgggcggccttggcgatgtcgatgccggggcctccgaatcgcgtcagggtgaacgtaccggggaattgcgcgtcgaacccgtcggcgatggcgtcgccgacctcgtagcagtcgccgcagatgcacggtccgagcgtggccgcgatgcgctccggcgcagcgcccttggccaccatcgcatcaatcgtggcactgatgatgccgcgctgcaggcccttgcgcccgcagtgagcggcgccgatcacgccggcctgggcgtcggccatcagcaccggcaggcaatccgcagcgaacatgcccagagccacacccgcgcgagacgtgacttgcccgtccgcctccacgacggtcgcggcctgcgcctcgccgtcggcggtcacctcaccgggcgtgccggacacatcgaagccgaacggggtgttcagatgccacgatgcatccacgtccaccgcacgcccggaatgcacctgactgaccagcgagagcccgcagccgacggatttcacgagcgacacgcgattggcgagaatcgcctgcgggtcgtcgccgcccttgccgccgagattgcaatcgccgaaatcgccgtggctcaccccgcccaggcgcgtggtgtagacgacagtgacaccaggcgccagcgcgatcgggatcgtcactggaaccgggttgccctcctcgtcggtggggctgatggcgttgctgtccagaatctcatcatcaaactgcgtatcgctcatgattccttatcctatgtgattgcgtgctcttcggctcggcgattggcgtcaggcggctttgagggtggggtgcttggtgcgggagcggatcgcggcgttgaccggcacctcatgcgggcacggcatggagaacacgtgcgctggattgttgatggcttgcacccagttgccgtcggcgtcgcgaaggccgttttcgggcacggtgtagatgagcggtgcatcgcccggcagcaggaattcgatctcctggccgggttcgatcttgttgcggctcatcagcgtgacgcgaccgccttcgtccgggctccacgacagcacttcgccgacgaccagccatgagcggaagtagccgctgcggttggtgttctcggtgaccttgcggtccgggtaatagaagccggtggagtattcgcggtgagcgaccttgtagggttcctctttcaaccattcgggcagtgtgacgggcggcgcgggcgcgacggccgcatgctgccagccgttcgtgtcgatcggggactcgtcgcgcgtgttcgatttgcggcgcgtgctgcgggcctgttgttcaagatcggagatacggtctggggcggtggggctctggccgacttccaggacgccgtcgtcgccggggacgccggcgaaggcgacgtcagcctgttccatgatgtggtccgtgagatcggcaccggacagttccgccgcgtacgggtcatcgttcagccaaacgggggcgggcgcgtcggtgcgaatcacgcggtcgtggaacgggcgcagcgtgttgccgtccgcggcctcgaaaccgcgctgcaccatgtattcgttgacggcggtcttgtaggcgttggtcatcgcggcgatgtagtacgcgcttttggcccgcccctcgatcttgaggctggtggcgccggagtcgatcaggtcatccaggtgctccatcatgcacatgtcctgcgagttgaacaggtacgtgccctctttggtcgcctcgaccgggaagtactggccgggacgcttctcctcgaccagcgagtacttccagcggcacggctgcgcgcattcgccgtggttgccgtcgcgaccggtcagataggtggagatcaggcagcgtccggagaacgccatgcacatcgacccgtgcacgaagcattcgacgtccatgtcgtcgggaatgttggcgcggatgtctcgcacggcctgcagatccatctcgcgggcgagcacgacgcgtctggcgccgaggtcgtacagcgcgttggcggcaccgtagttcgtgacgcccgcctgcgtggagacgtgcagttccagctcgggggcgacgctatgcgcggtcatgagcacgccgatgtcggtgacgatcagcgcatccacaccggtgccggccagctggctgatgtattcctggatggccctgacctcgttgttgcgcggcagcacgttgcaggtcacatatacgcgggcgccccgcgcatgggcgtagcgggcgccctcttcgaagtcctccaggctcaggttcttcggagcacttctcatgccgaacgccttgccgccgcaatatacggcgtcggccccgtaatcgaccgcagccttcagcccgcgcaggttgcccgccggagccagcacttccggcttacgccgggccattcgttgttgagattcaagcaccccaccagtgtagtgcatggaatctggtgccaatgtcgcgcctctgacatcaggcgtcaagtacaccccccccccttaacaaaatccgctcggcgagttctagtgatcgttgcaacacctgacctaccgcaaggagggtcaggtgaccgggagccaccgaaacgaagaccgtggcggggaacgccgttggacgttcaacggcgtcgaatatccgacgaggaagctgatgtgcgcggcgaggcgcgaggagtacatgcgtctgctggacgaggagggcatgaacttcacccaagccgcccatgcggtcggggtctccaagcgcaacggcaaggtatggcgcaacgggcgcacccgcgccaccgggaggaacaaaaaggcaagcatggactggtatcgttccaccatggacaaacccaaacggatccacgcgcgctacctcaatcaggaggagcgcatcccgatcgccgaccggctgcgcccgggcgattcgatccgcgccatcgcccggctgtcgggacgcgaccccggcgcggtcagccgcgaggtcgagcgcaacaggaaccccgggaccggcgactgcgagccctgccgcgcccagcagaaggcggccggccggctcaaacgccccagaccgcgcaaggcggccgacggcacgccgttgtgggcggagataccggccgggttgcgcaggcattggagcccggagcagatatccaaccggccgaggcggaggaccgggcggtccccggccactgggagggcgatctcatcaccggcagccgcaacaaaagcgcgatcggcacgctcgtcgagcgcaccaccaggttcacgatcctgctgcacctgcccgacgggcacgacgccgaacacgtccagcaggccatcatcgacaaaatggcctcgctgcccgaactcccgcgcaattcgctgacctgggaccagggagcggaactcgccctgcgcaaacggatcggcgcctcgctggacatggccgtctacttctgcgacccgcactccccgtggcagcgcggcaccaacgagaacaccaacggcctgccgcgccggtacttccccaagggcaccgacctatccgtccacccggtggactacctcgacgcggtcgccgaggaactcaacgaccggccacgcaagaccctcggcttcatgaaaccaagcgagaagatcatcgaactactcgacaccgcgtgataacctcaacaaccgacaacgtggccatggaaggccgctcaaacctcaggtgctgcaaccaccactagaatccacctcatgcaacgcatgactggggtggccatgccctggagtcgcaagactccagtgagactacaaaagcagactctcaaaactcgcggatagacaaggaaaaccgctattccaccggtgtatctgcgaattttgagagcctgtcgccttaaagcctcacaagctcgtcgggggtgagctccaaatcgccggcatgcaggctgtcgaggatggtctcggggcggtgggcgccggggatgacgaagacatggtcgcccttggcgagctcccacgcgagcacgacctgctggtaggagacgccacgagccgccgcgatctcgcggaacgggtcgaacttggtttcgtccttgggcttgcggaagccgcccagcgggctccagcacacgaagttcagaccgactttcgccgtgtattccagcgtatcggcggtgtcgaggtagatcggcgagtactggttctgcacggcgatgagcttgtcgccgaggatgccgcgcgcgatgtcgatctgctcgatggaagcgttggagatgccggcctcctgcgccacgccctcgtccaccagctgcttgatggcttcgacggactcgttgtacggcaccttcgggtcggggcgatggaagtagagcaggtcaatcgtgtcgacgccgagcgcgagcgcgctctccttgccgcgcttgatcaggttttcggggcgcccgtccacgtcccaggtggggcggccgtcggtgaagttgcggaaatgaccgaccttggtggcgatggtgacctcgtccttcgggccgttccaagaggccatggcctcgcggatcagcttttcgccggtctgctcttcgccgccggagcagtagtaggcccaagccgtgtcgaggtgacggcagccggcgtcgagtgcggcgtggatggtctcgatgcccttatcgtggccgaggttgttctcgatggtcagcggcatttcgccgaggccgatggcggtggtgccgaacggaccgaggttgcggtgcagtaccatgtgcatctccttgatggtcatatagtgtcgccctccacaatacgccgaggccgcggcggatacgaccccggtagcagcgaacggttctcaataagaaacatgcgaggattccgcacaatttcgcataatcgcacaaataggcaaagtaccggaattccagggctcagccgattttgatgttcatttcggccgacagcaggctcgcacctttcttattgagaaccgttcgctgctacaaatccgcccggagaccgctcatgtgactatccccacatttcacaccgacaccaaaaatccaccatcgcccaaaatcggcatcatcccaacgaaacactacatatagtgaccacacactgcgcgcgacacgacttgtaggggttcttgactgcaaattacaacgctgtagtctgagcgagtcaacacgttcaccccagcgcatcaagggagcaacatgaccgtcaccgtgttcaccaaaccgtattgcccgcagtgcgacgccaccaagcgccagctcaccaagcagggcgtgattttcgagaccgtgaacctggagcagaatccggagaccctggcacagctgcagcaggccggcttccagcaggctcccgtcgtgatcacccccgatgcatcctggaccggctaccgcccggacctgattcgcgagctggccaagaaactggccaagaagaccgcgccggtggccgcatgaacggcagcgcccccgccacccccggcacgccccagcctcatccgcgcagcaccccgatcgacctgaccgccgcgcacgccatccccgccgccgacagcaccacgcccagcacccccgagcagccggccggcaacacggtcgagcacatcggcgcggtcgtgtacttctcctccgcctccgagaacacggcccggttcatcgaatcctgccagctgagcggcatcggcatcgccgtgtaccgcatccccctcaagccgggctcggcgccgctcaacgtgcgcgagccgtacgtgctgatggtgccgacctacggcggcggcgacgcgaaaaaggccgtgccgccgcaagtgaagcgcttcctcaacaatccagcgaaccgcgcgtggatccgcggcgtggtcgcgtccggcaacaccaatttcggcaccgcatactgcgcggcaggtgacatcatcgccgcgaaatgccgcgtgccgttcctctaccgtttcgagcttatgggcacgcgagaagacacgcgcaaggtgcgcgatggactcgtgcgtttcttccgggaccaccgcggctgaacgcgccacaatcaccgttattccagttactccaagggaaaactatactcatgactgacttcaccgacaccgagctgccgctcgacaacaccaccgacaccactgtcgagcagtacgatccggcgcacgactatcatgcgctcaacgcgatgctgaacctgtacgacgccgatgggcgcatccagttcggtaaggacaaggccgccgaacgcgaatacgtcaccggccacgtggccacgaacacgaagcgcttcgaatccaccggcgagcgcctgcgctacctgatcgaccaccagtattacgccccggcggtgttcgaacgctactcccccgagttcctggacgacttctacgcgcacgccgaatcctccggattcgagttcggcacgttcctgggcgcgttcaaattctacacgtcatacgcgctgaagacgttcgacggcaaactgtatctggaggacttcccgcagcgttgcgcggcggtcgcgctcgaattggcggccggcagcgagcagcgggccgtcgaatacctcgacgagatgctctccggcgcgttccagccggccacgccgacgttcctgaacctcggcaaggcgcagcgcggcgaggcggtcagctgcttcctcgtgcgcatcgaagacagcatggagtcgatctcgcgcggcatcaacgcggcgctgcagctgtcgaagcgcggcggcggcgtggcgctgctgctcagcaatcttcgcgagctcggcgccccgatcaagcacatcgagaaccagtcgagcggcgtgatcccggtcatgaagctgctggaggactcgttctcgtacgcgaaccagcttggcgcgaggcagggtgccggcgcggtgtacctcaatgcgcatcatccggacatcctgcgcttcctcgacacgaagcgcgagaacgccgacgagaagattcgcatcaaatcactggcgttgggcgtcgtaatcccggacgtcacgttcgagctggccaagaagaaggccaagatggcgctgttcagcccgtatgacgcggagcgcgtgtacggcaagccgttcgccgacatttccatcaccgagcattacgacgagatggtggccgacgaccgcatcaagaaaacctatatcgacgcgcgcgagttcttcacgacgctggccgaaatccagttcgaatccggctacccgtacatcgtgttcgaggacacggtgaaccgcgcgaacccgatcgccgggcgcatcacgatgtcgaacctgtgctccgaaatcctgcaggtgcaggaggcgagctcctacaacgaggacctgacctactcgcacgtcgggcgcgacgtgtcctgcaacctcggctcgctgaacatcgccaaggcgatggacgcgggcctggccggcaccgtcgagacggcgattcgcgccctgacgtcggtgtccgaacacacgcgcatcgacgcggtgccctcgatccgccgcgcgaacgatgaagggcacgcgatcggcctgggacagatgaacctgcacggtttcctcgcccgcgagggcatccagtatggttccgaggaagcgctcgacttcaccgacatgtatttcatgacggtcgcctaccacgcctaccgcgcctcgcacgcgctggccgtcgagcacggcacggcgtttcgcggtttcgccgattcggcgtacgccaagccggccggcgaggacaattatttcgacaagtacaccgacggccgccgctccctcgccccgcgcaccgaactcgtgcgcgccctgttcgagcgtttcggcgtcgcgatcccgaccgaggccgactgggccgagctgcgcgacgacatcctgcgcgacggcatctacaaccagaacctgcaggccgtgccgcccaccggctcgatctcgtacatcaaccattccacctcgtcgatccacccgatcgcctccaagatcgagatccgcaaggaaggcaagctcgggcgcgtctactacccggccgcctacatgaccaacgagaacctcgaatactacaaggacgcctacgaaatcggctggaaggccatcgtcgacacctacgccgaagccacgcagcatgtggaccagggactctcgctcacgctgttcttccccgacaccgccaccacccgcgacctcaacaaggcccagatctacgcctggcgcaagggcatcaagaccctctactacatccgcatccgccagcaggcgctggaagggaccgaggtgcaaggctgcgtctcctgcacgctctgaggaatcgatggatgatgtatgcgtataccgcctttcttcggcgctcgacgtaccttcgtacgccttcggcctcagacggcggtctccacacacgtcatccaccgattcccctccacagccctgcgcacgcccgcaactcaaggaacccacatgtcgccaatgatctaccggctcatactccgtctgaccgcgccggaggagtttgaagacaaacccgccgacgacgagatcgacgtcatccgaaagaacgtaacagaccaccccaacaacgaaagacagacaaccatggcaccaatctccgtaccgcgcaaaccgctcaagctcatcgaccgcgtctccgcgatcaactggaaccgtctggaggacgagaaggatctcgaagtatgggaccgcctgaccggcaacttctggctgcccgagaaggtccccgtctccaacgacatccccagctggcagaagatgagtgacgacgagcacacgctcaccatgcacgtgttcaccggactcacgctactcgacacgattcagggcacggtcggcgcggtctcgctgattcccgacgcgctcaccccgcacgaggaggccgtgtacacgaacatcgcgttcatggagtccgtgcacgccaaaagctattcgagcatcttctcgacgctgtgctccaccaaggagatcgacacggcgttcgactggagcgagcgcaacgagttcctgcagaagaaggccgaaatcgtgctcgactactacgagggcgacagtccgctgaagcgcaaggtcgcctccacgctgctcgaatcgttcctcttctactccggcttctacctgccgatgtatttctcggcgcacgcgaagctgacgaacacggccgacgtgatccgtctaatcatccgcgacgaggccgtgcacgggtattacataggctacaagtatcagcgcgggcttgagcgggtgagcgacgcgaagcgcgaggagatgcgcgagtacacgtacaacctactcaacgagctgtacgacaacgaggtggaatacaccgagtcgctgtacgagcgtgtgggactgaccgacgacgtggagaagttcctgcgctacaacggcaacaaggctctgatgaacctcgggtatccggcgctgttcccggccgaggcgtgcgacgtgaacccggcgattctggcggcgctgtcgccgaacgccgacgagaaccacgacttcttctccggctccggctcgtcctacgtgatgggcaaggccgaggagaccgacgacgaggactgggacttctgacggatgtgtgccctcgcacggtggctgaaattgcgtcaccgtgcgagggcgcacagcgtgacggtggcctcacacagtgacgctttgagcggtacctctgcgcccctcagcgcaacggttctttgcatgaggggatatcaaccgttggaatcgcaccggttacgcataggtgctcgccagcggagtggcggcgctggcggccacgttcacgaccgtgctgaaccgcggcgaccacgcgatcttctccgacacggcctacatcgccgcataccgtctgctcaaccagattttgccggagtggacaatacgttcaattcgccgttcaacgcatggctcatcaaccgcggcttagtcacgctgccgctgcgcatgaggcagcacaacgcctcggcccaggccatcgccgagcacctgcaatcactgccgcgggtgcggttcgtggcgtatccggggctcgaatcgcacccgcatcacgcattcgccgccagccagctcgcccgaccggacgccggtttcggcggggtactcgcgttcggactgaacaccgaccatgacggacacaaccgtttcgtcagcaaactcaacgtcatcacgtcggcggtgtcgctcggccatgccgaaagcctcatcgtgtttctgggcgaagacgacgaacggcagtacctgtatccgcccgggttccatcagggtttcttccgtctcgccgtcggtctggaggatacggacgacctgattcgcgacatcgaccacgcgcttagctgaggttgcgctctcaaaactcgcagatagaggggcttttcagtcgagaagcccctctatctgcgagttttgagagcgtgacttcagcggcctccgaaagatccgccgccaatgccgccggaggagcccccgaacccgccgccgcccgagaacgaaccgcccgagataccgccgaaaccgccaccaccggacgtcgccgcgtggatgacggagccgatctcggagaaaccggcattcagctgcgcgccgaagtcaccgaagttcgcgctgaacgacgccgggtcgaaaccaccgccgacgccgccggcacccgccccggcggtcggaccgcccatatagccatacccgtacgggcggtagctccagtacagcagcgagccggcgccatgcgcgtccagccattgcggatcggtcacctgcgggtacgccttggcgaactccgccatcacgcggtccgaaataccgaacgccgcggcatacaccagataccggtcccacagcaccatgtcggccaccccgcggtcactgaaattgctgaaatcctgcagataccggtacagtccctgcacctgtcccgcataccgttggccggaagacgtcagcacgctggacgcagcatatgcgcacacgacgatcgacagcatcatgatcggtgcggaaatgatcagcgccagtgcgatattgccgccgaacaccgcgatgatgccggagaccagcgccagcgcggcgccgagaccgcccatccagctggccagcgtgccgccgtcgcgcgtcgctccgagcatcgcgaactcggacgagcacgcttcggtgaacaggttcagcgccttgtacccgttcttccagtcctcgcaatgccgcttcatgccgcccagatcgaacacgggagatccgacgcgcttggaaaccttctgcatcaggctcagcgcggcacgctcgctctggctcaggttgagctcccgctccgcgtccttgtcgaatcccgccggcagcagcactatggtcatcgtcttgcccagcgacttcgccttgccctcgtcggcgccaatcatgccggccagacgcacgttgtcggcattgctcatgtcgacgccccggtacaggctcgacggacccggatagatggcgatcgccttcttcgaggcgagcgacagcatcgtcgccgtcatctgcagcgagtcgacactgcccttggacagtcccatgacatccgccatcttcgcggccgaggcagggctcatgtccggcggctcacgccagtattcgatgtcgccgtggtattgggattcgcgatagctgcgcaccgccgcgaccatgccgatggcgaacagcgccaatccggcgaggactactgcgatccacaaggccacgcgcacgcgggccggtccggcctgctgttgccgccacgcgatttcctgctggtcttcggattgcttcagcttcggcaggtacgtgcggccggtctgctggcgcacccacgcggcatcgccctgccgccatccggacggaggcttgacggcggaggcgtcgtaggccgccaccacgtcgagatactgcccggcgcgaacatcggacgcgctgaaacgcagcgagccgtcgtccatccgggaggtttcggagacgccggcgtagtgcagccatgcccagctgctggaggcgtcgatgccgtcggggaagcgcacaattccggtgaccttgccgatggggatcaggttgctgtcgccgaacggctcccactgccacgatgccacgtccttgtagagcgtggtgccgccgtggagcgtcatcgtcacgtcgaacttgagactgctggcttttttggtcgcggggatgttccagccgatctccacgtctttcgaccgccgcgaggtcgtgttgtcgctgatctcgtacccgtccttggcgggatcgaacggctgggggttctcggccccgtcggtcacgtccgcgatgtaccagtgcccggcgtattcgcggtcccatgacgtatcggaatggtcggccggcgatgccagcgcgccctgctcatagttttcgccggcggtgacgttgcgcacgctgatgtcggtgatgttggtcaggccgtcctctcgcagcgtgtacttctggtacagctgccgccatggtgtgtcgccgtcgcgcgtgcggagcttcatgtcgatgtgctgggtaaccttcaggctgccgtcggcttgaaccgcgacgtcatagtccagcgtgcggtagctcaggtcgggcgagcttccgctcagcatcaggccggcgccgatgacgatggcgaagacgacgagtgtgccggccaacgccgttgccagcgagcggagcagacgtttcaggttcatggcgatctccaatgatcagcagcggcgatggttccggcggtcggtgacgtcgggcgtcagaaacgcacctgcggcacctggcgggacccctcgtcggcctggaagtactgtgcctgctcgaagtggaacatgccggcgatgatgttgctcggcaccgtctcgatcttggtgttgtacttgagcaccacatcgttgtagaactgccgcgcgtaggcgatcttcgtctccaggtccttgagctgcgcctgcagatccatgaagttctggttcgcctgcagctgcgggtacgcctccatggtcgcctgcaggttgaacagcgcgcgggacagcgcgttttcggcggcggcacgctcgacggtggtcgcgttcgggttcgccgcggccgcgacggctccggcgcgcgcctgggtcacctgggtcagcacggaggattcatgcccggcgtaccccttgaccgtttcgaccaggttcggtatcaggtcggcgcgctgcttgagctgcacgtcgatctgtgcccagccgttcttcacgcgattgcgcagcgcgaccagcgcgttgtaggcaccgaccgcccacagcaccagcgcgatgatgacgacgatgactatcgccagaatgatccaccccatgtgcactccttcgtatcgttgttgccgccattgaagcatgactatgtgaaatgatacgtcaccgtgtcgccgtccatgtccttcactccgcacggtatcatcaaaggacgtggccgccctcgccggcgtcgcgcagagcaccgtgtcgtatgtcatgagcggcaaccggccgatctcgcagaagacgcgggacaaagtcgagaaggcgatgcgggagctcggctacgtgcccgacgcgcacgcccgggccatgatcagcaaccgctcgtacatcatcggtctgctcaccgaaaccacggagaccacgcaaggcgcggagctgttccccatcctgcgggccatccgcgccaccgcgaaggaacacggctacgacctcatcctgatgtcatcgacctgcacgaccgaagacctcgccgacatgcgtcggctgggcaaaggcaacctcgtcgacgcattcatcatgctggacatccggcatcatgacgggcgtctgaaatccgcaatgaaactcggcctgcccatcgtgccgtacggcgaccccgagtttccgttcatcaacatcttcgaccgggagagcgtcatatgcgccgaacggcatgggatacagctggagcggttcgaggcaaaggacacgcgctggcaatcgttcgagccgctgacagggaagttcccggagtggaagggcaacggcgtatgcatttacacccgctcgccgcggacgcttgcgtggatagagcagatgatgctgctcaccggcgtcgccccaggcaaggacatcggactgatcggcgagggcggtcgaagtcgccatcgagcagatcgaaggcaaggaattcgagcccggcgtagaacgcacgccgccgagattcacccgccgcgagaccacgattctcggattcgcgggctgaggccgcacaaggggcatgcggcctttgccgcaggccacatccggaaacggtgccgcctcacctaccgtggcgaatgccccgccaggccggatcatccccaaattacgggttgaaattgtcgatatctgtgattccccgtgcgaaatcgccgttttagggcccgaaagcggcgatttgacacggggaattgcgaataacgacaatttcaacccgtaatttgacgtgcaggatgggcgcgcggcacagaaaacacaaaaacggggagccccgtgatggggctccccgtaagtgaggcgcaggctacccgcgttggctcagaggacgccggttctcggacgtcgagccgttagtgcgagcggccatgccgcaagagatcagttctcgaacggatcgaagtcgcgacgcacgcggcggcgcggacgctcggagcgctccacgcggtcggcgcggtactcgtcgtagttctcgtcggtcgcgtaacgcgggttgcgatcgtaaccgccacgacggccaccacggcgatcatcggaacggccgccacggcggtcgtcgcgatcgtaatcgcggtcgtcacggtcggaacggcgacgcggacggtcatcgcggtcatagccgcggtcgtcacggtcgtcgtagtcgcggtcggaacgacgacggcgcgggcgatcgtcgaaatcgtcatcgcggtcgtcacggcgggaggagcgacgcggacggtcgtcgtagtcgcggtcgtcacggcggtcatcgcggtcggaacggcgacgcgggcctccgcggcggtcaccacggtcgccacggtcgtcacgacgaccacggccggcgttgttctcctggtcctcgaaaccggggatggcgagcgagatcttgccgcggtcatccacgccctgcacgacgacctcgacggtgtcgccttccttgagcacatcctcgacggcgtcgatgcgctcgccgttggcgaggttgcggatctgcgagatgtgcagcaggccgtcggtgcccggggtgaggttgacgaacgcgccgaacgacgtggtcttgacgaccttgccgttgtaggtctcgccggcttccggcacgtgcgggttggcgatctggtcgatgatggccttggccttctcggccgcttcgccgccttcggaggatatgaacacggtaccgtcatcctcgatggcgatctcggcgccggtgtcctcctggatctggttgatcatcttgcccttcggcccgataatctcgccgatcttgtcgaccggaacagtggtggtgatgatgcgcggggcgtactcgctcatctcggccgggccgtcgatgcactcgttgatgaggtcgaggatcgtggtgcgggcctcgtgagcctgctgcagggcaccagccaggatatcggccggaatgccgtcaagcttggtgtcgagctgcagggcggtgatgaactcggaggtgccggcgaccttgaagtccatgtcgccgaacgcgtcctcggcgcccaggatgtcggtgagcgtcttgaagacgtgctggccatcgacgtcaccggagaccagacccatcgcgatacccgcgaccggggccttcagcggcacgccggcggcgagcagcgacagcgtggaggcgcacacggagcccatcgaggtggaaccgttggaaccgatggcctcggagacctgacggatggcgtacgggaactcctcgcggcttggcagcaccggcacgatggccttctcggcgagggcgccgtggccgatctcgcggcgcttcggggagccgacgcggccggtctcaccggtggagtacggcggcatctcgtagttgtgcatgtagcgcttggactgcgggccggaaagcgcgtcgatctgctgctccatcttgagcatgttcagcgtggtgacgcccaggatctgggtctcgccgcgctggaacagggcggagccgtgcacgcgtggcacgatgtccacctcggcggacagggtgcggatgtcgcgcagaccacggccgtcgatgcggtagtcctcggtgaggatgcggcggcgcacgatctggcgctgcagctccttgaacgcgttgccgagttccttctccttctcggcatcgtccatgtcggtgaactcgttcgcgagcacctcacgcacgtgctccttgatctcgtggatgcggtcctggcgcggcagcttctccgcgatggacagcgcctcgttgaggtcctcgtgggcgatctcgtcgatgcgggcgtacagctcgtcggtgtactcggggaacagctggaagtccttggtctccttggctgccttctccttgagctcgttctgggcttcacagatcaccttgatgaacggcttggcggcttcgagaccctgcgcgacgacttcctcgtccggcttgatctggccctcgtcgtagatgaggtgccaggcgttcttgccggcaccggcttcgatcatggcgatggcgacgtcaccgttctcgatgacacggccggcgaccacgatctcgaacacggcgcgctcacgctcgctccagcgcgggaaggcgacccactggccgtcgatcagcgccagacgcacgccggagaccgggccttcgaacggcaggccggagatcatcgtcgaagcggaggccgcgttcagggcgatgacgtcgtaggcgtcgtcgggatcgatggacagcacggtctccacgacctgcacttcgttgcgcagcgtgtgcgggaacagcgggcgcagcggacggtcgatgatacggcacgccaggatcgcctcggagctcgggcggccttcacggcggaagaacgagcccgggatcttgcccgcggcgtacatcttctcctccacgtcgacggtcagcgggaagaagtcgtagttctccttcgggctggaaccggcggtggtggtggacagaatcatcgaatcatcgtcaagataggctgccaccgcgccatccgcctgctgtgcgagacgacccgtctcgaagcgcagggttcgttttccgaacgaaccattgtcaataacggcctccacggccttgatttcgggaccctccatagggttcctccttttttgttctattgtctgctgatatctgtaatccacatcgagacgccgaaatcccgatttgttcaagcttgtcggcttttctcattgacgcggcccgtcccggaccgcacccgttcattccagattcttcttcatcatcggccctcaaccgccgggccacagtatgtcatccgcgaattcgcaacatcctcatccacatgccgatatgcaaaacgcccgagcaaggaatgcccgggcgaaagttctcttatcgacggagaccgagacgctcaatcagggaacggtaacggttgatgtcgacgcgcttgaggtaatcaagcatacgacgacggtcaccgaccatgagcagcagaccacgacgggagtggtgatcgtgcttgtgctccttcaggtgctcggtcaggtcagcgatacgcttgctcagcagcgcgacctggacctcgggggaacccgtgtcgccttcgtgcgtcgcgtacttggtgatgatttcctgcttttcttcagccgtaagtgccacggcatcctccttatggttgctgcgcggtgcacccggctttatgccggtgcgctctctatccgcgggcgaaacacgccagtgggatagtataggcaaggggtcggactacttccggcctttcgcggcagggtctcacaccgccgtcagcaatccgccgaacagcacaatgagcagcgccgcggtctcgatggcgaagaacaggatgaacgaagcccagctgcgcgtcagcacgttcagcggagagtccttcttgatgaggatcagcaggccgacccacacgaccgcatacaccgccacgccgaccccggccgcgatgattcccagattcgccgcattcggcagctgcgcggagtcgccgtacaccacgtacgtggagtaccagaaattcagtttgagcaggctcaggccggcgatgaactgttcggcggccagcccgaccacgaacacgatgcggcacagccagttgcgcgactccaccacggcgagaccgagtccggtgaacgttgtcagcgtcacggtccacgacacgaaggccacgccgcgcggggtgaacaggttcagatgggtgatcagccattgcgtgtggccgaccgccagggagcgtccgagccagtacggcgcgatgatggcggccagcaccgccacgatgaacaccgcccatggcaccgggtgcgactgccgccgctcgatatcggccagagacaggtcggtcaccgggatggatgggtccggatgcttggaaacgtcaacggtttcgacgtggtcaccgaccagttccgtcgcctcgttgttattggtttcgtccgccatgttcgcctcgctcgccatatgttctttactgacttccatgcacgacaatacgggctgaaatagacggaatccgggattcaccgtacaatatcgccgtttcggcaccgcgaaacgtaccatttcgtacggggaatcttggattccggccatttcagcccgaaattgccagcgtcgtccgggccgacgccccggctctcacgagcgagggcgaccgcccggactcatgccgaatcagccgatccgcttgcgcaggcaggccatcgtcacgcccgccgcggccaacatcgtcattgcggcgatgagaccgaagacgtcggcgcccgtgttggacagcttgccgtcggcgccgggcttgctgacacccggcttctcgccgggcttgttctcgccgggcttctcgccaggccgctccggctcggtgccgtcgctcttgaccaggcccttgatggccgtgtcgagtgcagcgcgcagcgcggtgtaggtggcgggatcgccctcgccgttcgggtcggccttcagctgcttgctcagggcctcatacgcgacggtgaacttggcatagctgtccttggtgtactcggaggccttgcccacgtaaggctcggcgtcgttcagcgcgagctgcgcgtagtcgcgtgcggactggtcgtagcgcagcgtggacttcgcggcggtgtaggccgcttccagcgcctcgccgtcggccttcgccagatcgtcggcgttggccagcgcggcggcgaagtcgtcgtacgcggactggtacttgttgtagctcgcctcggtgtaggtggcatcgtcgttggagacgtgctcggccttcagctggtcggcggtcttcgccgtgtaccgttcgacacccttcatcgccgattcgagcgcggcgacggcggcgtcgaccttggcctgcgtggcgtcctggtcggcagcgacggccttggcggcggcaatcgcgccggcgagagcctcgcggctcgacttggtccagtcggtggagtcgaccttctcggcttcggcgatcttggcgttcagcgcgtccttggtcaccgtaccgggttcgtcgatcttggtggcggacaggtcgtacaccttccaccacttggaggtctgggccaggttggtgatgcgcacggccttgacggtcgcggcggagtccagcgtgaagatctgcttctggtcgccgttcacgtcgccgatcttggtccagttgccatctgcatcctggtattcgatcttgccgttgacgatcgtgtcaccgcccttttccgcctggatgaagcggaactccttggccttgcgggcctcggcgtaggtgacggtgagggcggcgttggccttgacgcagtcgcagccggcggactgcatccagaagaacgtgctgtcgtcaccgtcgatgacggccttcggatcgacgttctcatgccatgccgcggcgcccacgccgttcgtgctgaccgtggcgtcggagggcgtcggggtgacgctgccgctggtcttgaccttgacgaaggaattgagcgcctgcacggtcgggcgcacgatgaccaggccgccacgggcgggcttgttgcgctggtagtaatcggcgatcgtatgcgtgtcggacttggcgaaagcggccttcgcggttgcgtaggtcgccttcgcggcctcggtgtcacccgcgagcgcctgcttggcggcggtgatgtagtcgatggcggaggcggtcaggtcgtcccagtagctgatccacggttcgatctggtcaaacatgttcttgtcgccggggttcgcgcggtagttcttcgcggcgcgctgcagcgtggtgtagacggtgagcgcctggctgaagtcggccgcggtggcggtgccgccgtccagcttgcccttgagttcggtcaggacgcccttgacgtcgagcttgccggtgtagtcgacggactcattgttgatccaccacttgttgacggcgtcatactcggcatccttgtgcgcgccgtcgatgccgccgtcgttgaggatgcgcatgttcatggcgaggtcacgcaggccacgggagcccttggacgcgatcggcgagttgtggtcgatgtagctgaaggagtcctcccaggactgttgtccgtccttttcgctctgccacaggttccagctgtagtcggcggccatgaagatgccctgcttgctcggctcggactgctgcatcgggttgagcatgatgccgtcgtaggtgccgtatgtggcgccgggcttgaggaagttgttctggcctcccatgaccaggtactggtaggcggtgttgcggttcatgtcggagcacggccagttgatccacatgaacggggcgcgaccggtgttcttggtgaacgtgtcggcgaagtccttgctggccacgccgaaggtgcggccgccggtcatgacgatctgcacgttggatgggatgtccttgtaccaggcgtcaccggctccggtgtagctgtacagggccgggcagtagaggatcgtgtccttgaggccctcgtacttcgcggtgccgtcgtcgttcttctcctgctgcagctcgtggatccagtcggtcaggtccttcagcacgcgcacgtaggtgttgtcgttgccgtactgcgcaccccagtcggtggagtcgtcggcgagcagtgcgatctggcgtacgccggcgtcaatggtctgcatgtacttggccttgagttccttgaggtcctcctggtagtgctcctcggtgtcgaagcggaagtgcttgcccctagcctcgccgtcgttatggaacggcgcgagcgcgtaaacgaaacgcaccttcgacttgttgccggcctcggcctgcggcttgatctcgttctcgatctggtctttggtgtacaggccgcgccagttgttgcggtgcagcggatcgtccttgggggcgtacacgtaggtgttcatcttgtagtagccaccccaggtcatcaggttcacgcggtccttggtgctccacgggctgccgtaatagccttcgatgaagccgcgggacttgacgtcggcccagtcgctgaaggtcaggttgctgacggcgcggcccggcagctgctggaagatctggtacagggtagtcaggccgtagaacgcggaatcggtgtcgcggccgagcacgaggatcgtgtcgggcgtcttcgcgttgccctgacggacggcaagcacataggagtcgttcttggagaacgtgctgtcgtccaccttcagggtgccgtcggcgatcagctgcttggcgtacttgtcgaccacgccgttggatccgttgatgccgaccagcacgttgagctggtacgcggtttcgggcacggcgtcggccgcggtggtctcgatgcccttgagcttcagggcctcgttcagacgggccttggtggcggaatcgattcccggttccacgacggtgttcgccttgtcgcgcagaatcagactgccggcgccgtactcggtgttctgcggctgggggtagatcttgtactggcccgactgttgggtcgtgccggagtcggccgccgtgccgctgtcgctggccgccatggccggaaccgcgaacgccgcggtcatggcgatcgacgcgatggccgtcacgattttgcctagaatctcatgcgtggaattaccattcgctcgcatttgtttccttatctgttcttgtgatactgtgcaccgcccgcgcatatgcctcatcacatgaccaagcccacatcccggtgggcctgtcctcgtcgctgcggtatatctggcgtgcggcgaaacgattgcgttcccgcgggttttcgccagatgccgcgatccatatttcagcttctcgtggcagtcgtcatcgacgacgcgttctctcaaccgttccgattagtcatgctagtcttactatcgaatcacatcaaacgcgattggacggccggatttgccggtgaagtggcagtggagcggatgacgggaatcgaacccgcgtaatcagtttggaagactgaggctctaccattgagctacatccgcgaaaatgtcgcttttggcgacttgagctattatacacatcgccgacactttggcaactcccgtgtccatgcggaacgggaccgtcaaaacaggaccgtcggaacaggcgtcacaccatgagaccgatatcgccggtgctcagcctctccgtctcccctgatgccgtgcgcacgctgatcgaagcgtcatcgttgagcgataccaccttgccggcgatcgtccggccgtcgatgagctgcgcgtcgatctgccgccccatcatccagcagacgtggtgcatctcggagcgcaaccgggaactctggatgagcggcatctgcacgaacgcctccagacgggtgcgcagtgaagcgaccaggcgcgccgcgatcatgtcaatcagttccgcggtcggcggcagcggtgcgacgtgcatccgcagcgacgtggattccggcgtcggcaaacgatccgcgggcaccgacaggttgacgcccacgctgaagatcacggcgacgtcaccgtgccggtcgggcggcgaggcgacctgggtgaacgtgctgccgagcttgagtccatggcagtaaatgtcgttcggccatttgagatggaacccgcattcggggtcgaacgggaccgcgccgcactcgtccagggttccttcgatggcgtccagagtggccaggccggcaatcatcgacatccagccgttgaccgcgtcatcggtcgccaccgattcggggatggtcacgatgaacgatatggcgaacgagtgcccgggaacgcatgcccacggccggccgagccgtcctcgggcgtcatccatggcaccggcggcgaccacggtgatggcgatgccgccgtcatcgttgcgcgcgaacctcccccgctcgatgagtcggcgtgccttcgcatgggtggaatcgatgcgttcataggcggccacctcgtccgccgctttcgcagttcggtcaagtcgcggcgctgcgactttgtgtaaggcaatcatgatgatactgtacgccggaagatatggcagcgtcaaaacggatgtatcgtcacacaagcgtcggccgcatacgatacgacccgctggcgcgtctcccgggagtcttgcccgagcctcgcaccagcgggccgtaaacagccgacgagcccgatgtcggattctgccccgacatggatggcgtacactcgccagccgatgcctgcggacgccccaacgaatatccgcctgcatacatacctatgacgcacgcttatttcgagcgtcgtcttcaaagagtctgagaactgtccgtatagcggcgtcatgactgccgaaaaccgccgtcacacggtcaacatggcgacggccgaggcgataccgccatcatggctcagcgagacatgccaccgaaaaaccaaggaaaccgatgcgctcgacgccgcagccggctcggaacccgtgctcaccggagtcacgatcggcacccgcatgaccgcaggccccatcctgaccaacccgggcgcgcccgacatttcatcggagtttctggaggctgcggggggcagcgacgcacgcagcttccgctcgacgtccggccgcaacgcaacgcacggtcggctgcgcgaatcatccacgatttcaatgccgttccacgggaaattctcgatggtatacgggttcggcatgtcgccgagcgcgtcgcaccaggctttcagcaccgcttccttgccggcccacttcgccgccaagtgggtggactcgtcatcgttcttgcgtctggcccgctcgccggcctgcctcacctcgcgcacagagaacagccctcgcatgcgcgaacccggttccgcaagctgttcggcgaacgccgagacatcgacgacatcgtgcccgagaccgagaaccgacataccgcgccacctttccgagagacctgttccagtgtatgacgggtccgggccgctttgcgtccttaagtgcgcgccgaaacgacaagtgtgcgcacttaaggacgcaaatgggctggtttgcgtcgctatgtgcacggacacgtcgtttcggcgcgcacttacgaacgcaaaatgggcccacacgcggaaacgtgcgggcccatcattcagcagtcagacgtgactcggcagatcaggcttcgaagaagccggactgaccgaggcgggcgtcaggctgagccgtcaaacggggagtccagtgaactccccgtaggcgaagcgagcgggcgcgctacctgcgcccgcgagggaatcctgacgaacgactcggcagatcaggcttcgaagaagccggactgaccgaggcgggcgtcaggattcaacagcatggccttttcgacttcgtggccgttgtaacgattgccgtcggcgagcttggtgccgtcctcgcggaagcgacggttgtcgatcggctcgtagagcgccgcgcgacccatcatgccttcctcaaggtgacgctggccggcagccagacgggcgttcgcacgctcgcgccaggcgttcagtgcgtcctcacccgcggtgtgtgccacggccgcctcgaaggcgcccgggttcacgatcgcggcgaaaccgctcacgtggccgaagccgagcgaggtggcgaggccggccttgacgcggccgacgtgcagcggcttggtgagccacaccatgtggtcgtcgcgctccagcttcgggtccacgcagtcgagcgagacgttggccgggatcacgccggacttgaacagctgcgtcaggccgttgacctggaagatgcaggcgccgcccttcgcgtggccggtgagcgtcttctgggagatcacgaacagcgggttgccgttcgtgcggccgatggcgtgcgccagcgtgttgtgcagctcggactcgttcgggtcgttcgcgttggtggacgtgtcgtgcttggagaccacggcgatgtcgtcgggggtgacgccgagcgcggccagatcgtgcacgagcttcgagtcgcggccgccgaggccagccgccagggcgccgaggcccggggccgggatcgaggtgtgcgcgccatccgcgtacgagtggatgaagccgactacgccggcgaccggcagacccatgcgaagcgcgatgtcaccgcgcgtcagcaggatcgtgccgccgccctgggactccaggaagccgccgcggcgacggtcgttcgcacgcgagaagaagcgcgcgtcgatgcccttcgcgtacatctcctccgagttggcggtggcgttcatgttgccgaagccgatcacggattccacgccgatatcgtcaatcgcgccggtgaccacgaagtcggccttgccgagggcgatcttgtcggcgccctcctccagcgacaccgcggcggtggcgcaggcggagaccggctggatcatgttgccgtagccgccgacgtaggactgcatcacatgcgcggccaccacgttcggcagggcctcctgcaggatatcggtcgggatctcatggttgaggaagcggtcaaggtacagcttgcgcatcgacatcatgccgccgaagccggttccctgcgtgctcgccaccatcgaaggatggatggcctgcagcacctcggtcggcgtgaagccggcggacaggtaggcgtccacggtggtgacgatgttccacagcgcgatcttgtcgacgtcgccgaccatcgaggccgggatgccccacttgagcgggtcgaagcccttcgggaactggccgccgaccgtgcgcgtcatcgtggcgcgacgcggcacgcgaatcatcgaaccggcgtgacgggtgacgttccattcgcccgactccgggtcggccgcgatggaggtgtgcgcctcgtccatcttgacgtattccttggcaatgtcctcggtgggcacggagaaggtgacgtcgtggtcgaggaagacctcggtctcctcttcgtcggcgccgtccttgtagtcgttgcccatgccttcatcgaacggacggatgccggagcgggccacgacctcgtcatggtagcgctcggcgatgtcctcttcgggcacgaggttgccgtcggtgtcgtaccaacccggcttcggactgtcctgccattcgaccagacccatgttccacgcgagttcgagcaccgcgccggcggacaggtcgacgctgccgtcggagtggattccgagctccgcctcgaagcgggtgcggccggagccccacgggcccagctcgccgatggagacgatgacgatctcgtcctcgggcttggcggtgacgttctgccagtcggccaggtcgaccggcgcctgctgcggcacgtgcgggctgggcagcgccttgatgctcaggccggatgcggcggtcttcgcggaggtggagtcgtcgtccgactgctgtgcggaggccgcgtccttctctgcgtcggccatcgcctcggcgcgcagcgccttgatatcgatcggggcgttgccgagcccgccggtcaggtccacgtcaagcggatgctcgactgcttccgcgcgggattccgcggtgcacaggtcgagcagcttcacggcgatctgttcggtggagtacgtgtggatgccgtggcgttcgacgacctcgaccagcgggtcgttgccgcccatcaggccggtgccgcgcacccagccaatcttcgggtgggcgaaagtgacacgggacgaccataccttttcggcatgggcgcggttgacgatcgcgtcaaacgcgctcttgacctcgccgtacgcgccgtcgccgccgaagatgccgcggttcggggagccgggcagcaccacatgcagcttgtgctgcacgtcggtgtcggcgccgatggcggataggccggcgatcgcgcgttccacgccccacagcatcagtcgtgcctgggactcgaacagttcgccggagtcggtcaacgtgccgtgcaccggcggggcggcgaacgggaagaacagcgtcggctcgtatgcgggcttcaggatcgtggtggtcgcgccggaggtcttcttctgcacgttgccgatccactggaccagttcgtccacgtcgcggtagctggacaggttcgcgggaaccagccacagcttggcgccgcccaccgcgtgctcgcggtaggtttgcttcgcccacgccttgacggacggacggaagctgtgcgaggtggcgatgacggtcgcgccgccggccagcaggccgttgacgacctgcgcggcgatcgagttcggagccacgccggtcaccactgcgatgtcgttcgcgaagcgggatgcgtcaggcacgtcggcgaccgattcgagggcctcggtggcgatgcggtcgaaggtgtcggcgagccgtccatggctcttggacgcgaaccacttggcctggtcggcgacgtccttgccggcgccgacaaagctcagggactcgacagactggtcgccgttgtagaacaggcgagccaggtcttcgcgcgcggatgcccagcggtcatcgaagaggatggccttgcgggagtcgaagcgcggctcgacctgcttgggccagtcggagccgagctcggcgtcgacggcggccacgacggccgcgttctcgtcctcgccgggttcggcggccggagccgtcacgcccagttcgttgagcacgtaacgggcggtggaggcgagcacgccgttggcaccggtgaccttctccgcgaaggcgtcgagcgccgcggaatccaccacggcaccgccggctgagccgccggcgctcggcttggagacagccacgcccttggtctgcccgaccagggccaccgcatcgtcgatgagctgatcggcagcggccgcattggcggcggcgccggtgggcagcttggccagatcaccgccacgcgagctggcaccctcgcgggtgtcgagcagcagggtcgcggtcacggcggcaacccagccttcgccgagctgccacacgttggtcacgcgttcgcggatgtgcgcgggcttgacgccggcggcaccgaacagcgcgcgcaggcggtcacggatcgcatcagacagtaccgggccgaacgccttgtagttcggggcgaccttgttgacgagctgtgcaagctgggtgagcgtcgcctctgcggcgccatccacactggccacacccagctcggagctgatatccatcagcagctggttgcggcgggacgacacgccattggtcagcgtgtcggtcgtgtcgttcgcgccgatttggtcgaggcggatctttgtggagtaagccatgagcacaccgatggcgtcggacgccttgaacggcaggtcgtcgaccgggccgctgacggcggaaccgagttcggcgacggcggaaccgacctgagcggcggacggcgcggcgacgactgccggagccgcggcgggcgcggcggcagcgggcgcagccggagccggagcagcagcgggcgccgcggtctcggtctcctccggctcatcgtccggcaccagtgaatcagagtcggtcatgtacacacggccctcatcgcggccgacgttgtacacggtcacgtcacaacccgagaaatcgggcagtcgcagcgtcttggagccgagattggcgagcgtcggcgagttgccgagaccgacctccacgtactcctccacgccgagaccaccgcggttggcggggttgaacagcagcgcctgggtctcgatccagcgcacgggggacgcgaactgccacgacagcagttcggtgagcagcagacggccgagcttctggtcgtcggcggcgtaggagtcccacactgccgggtcgtccagagcggccttgatgcgctcggacggcacgacttcgaggatcttggcggcgaattccttcgtcatctcgaacggggacgccaccaggttcgggatgtagcggtcgaccagacggccacggtagtcgatgtactgcggcagcagcgcgtcgagtttgtcgcggaactccggcacgcccttgcgaagcagcgtggagtggaacggcacgtcgatgcccggcaccagcatgaacggcggcttgccgccatattccttggcgcggcgggacgcgtcggcctgcaggtacttcaggccggcgatcgtgccggcgatcgcgtactgctggccggcgaggttgtagttcacgatctccagaaactcgccggacgccttggcgacggactcgacgtattccttgacgtgcgcgtcgttgacgccgaactggttcggacgcagcgcgcccatgcggtagttcgagcggccctgggcgtcgcgctcgatcaggtggtgcatggtggagccgcggtggaacaccagttccagctcggtctccagcgggatgatgtcggcgaacgcggacagcgcgttgtactcgccgagcgagtggcccgcgaagtacgccggccagatgtcggagccggcctcgcgcagacgcgcggtctgggcgtaggccaccgtggcgagcgccacctgcgtgaactgggtgaggttgagcaggccgtccgggtgacggtaggtcacgccgttggcggtgagctccttcgggttgtcgcgcacgaccgcgaggatcgagaagcccagcttggagcgggtcagcttgtcggcgcgctcccacacgctgcgggcggcgggcgacttggcacgctcgtcaagcaccatgccctgtttctggatgccctggccggggtagacgaacgcggacttcggcgcgcggaccagcgcagtgccgcgcgagaccagctgaccgtcgatgcggcaggtcacttcgaatgccatgccgccgtgctcgaccttgccgacgcgctcgatggagatctccaccttgtcgtcgagctgcaccatgccgtacatgttgtaggtccagcctgcgatctcgtagtgagcacccttgtcgtccagcgcctggacggcgtgctgggcggtggcggacagccacatgccgtgcaccagcggggcggcgagcccagagatgcgggcgccgcgcgtggaggtgtggatcggattgaagtcgccggaggtacgcgcgaatgcagtcatgtcatcgggtgcggtgacggtgacgcggcgcagcagacggcgaggcgtggcctgcaccgtggctgcggcggagtcgtcctcctgcttggcttcgagggcgccaccgtattcgggggcgtcggccggcagcgcgtcggagtagacgcggccgcgaatggcgaagcgctcggtctcgcgggcgagcacggtgccgtcggcggcggtgtgcagcacgtggatggtcacgacgcggccggatgcggactcgaagtagtcctcggcccagctggtgagcgtgatggtctcgtcgacgtgcttcagcagctcgtcctcggtctcctcaagctcgatgaggtggtcgagatgcaccgcgttgagcagtccctcgatgaccgggtagcccttgacgtacacggagccgagcgccgcgtagatcgccggccatgccgggccgaccagcgcgtcgggggcgatgcgcgagggcgcgaggtcctgcggcagtgcgccgccggtggccgcctcgtggtcgtagccgaggttggcggacagcgtgtaggtggccgacgcggtgccgaacgggtaggcggccttgtcgccggacggggtgatcttcggcatgtcggtcagcttgtcgccggtgatggcggtgttgccgatgcctgcggtggcggcgagcatcgcgtagacgttgccgaccaggcgctcgcggttgacgaccggcagcaggccggtttcggtgccgcgcagcgtcaacgggatgacgatgtcgcgcacggcgtgcttggagacgccaccgtccggatcgttgtcccagtacgtgtcgagatggatgtcgaggtcgtattcctcgccctgctcggaagcgccgcggtcgatgatctcatagttggtgtcgccgacctgcgtgccgtatgccgggttcgtggtcaggtggccgacccaggagatgttcgggcaggtgcggatgaacgcttcggcgctctcggcgccgccgagctcgctgtaggcgtcggtggaggcaccggactgcagttcgcgggtgcgctccagggccgcggcctcgaaacggccgaggatgtgggcgacgggctcgtcgacggtggtgatgccggccacggagatcgggccgggaatcacgcgcacggaatcggcggaatagcgggcgtcctcggactgccacagctgatcctggccccaccggcgcagcaggtcattgtcgatgaccggcacgaacggcatgggcttgggatattcgctcacgagtaccgggaaccaagccacatcggccggggtcacgtggatttcggcaacctgcgggtaggcggcttccagcttggcgatggcggccttcggatcggaggcgacatcgtccacgccggcgaacagcgaggtgaactcgccggattcctgaccgcacacacgggcttcgatgcgctgcagcaggtgcaggaagcgcagcgaatacgtcgggtcgaccacggggaacaccaggtcgacgaaacgctcggcccactcgacgtaggtcatcgaggcgaggtcgccgaagtacggcttggcggtggcgtcgagcgccttgatgatctcatcgcggcggctttccagctcttcggggtgcttcatgacgcgcaccagcagacggccgcaggcggcggaggcgttctcgacctcgtagatgtcggcgtgaaggtggctcaggccggaggagactccgccgaccgacttgccggacggcacccacttctcgccggcgggcgcgaacgggtcggcgtcggccgacgtgtcggtgatgccgggcgtcttgacgagcagctgcttgaccgcggggctggtgtgggcctccttggcggtcatgacggcggtgccgatgagcacgccgtcgaccggcatgtcgggcaggtcgtaggcgcgcgcccactggccggagatgtagtcggccgcgcgctccggcgtaccgatgccgccgccggcgaccagcacgaggttgctgcatgcgcgcacctcggcgtatgtggaggtcagcaggtcgtccagcgactcccaggagtggtggccgccggccgaaccgccttcgacctgcatcaggatcgtcgtgggggccacggccttggcaatcgccacgacctggcggatctgcgcgacggtgccgggcttgaagccgacgtagggcaggccgtccgcctgcagggaggcgacgagcgccttggcctcgtcgagctcggggatgccggccgagacgatcacaccgtcgatcggcgtgccggacgcgcgcttcttcggcacgatgccggagggaccgaactgcaggttccaaaggtagcgatccatgaacatcgcgttgaattcgaccgtgcggccttcttcgagcaggttctccagctcggcgacatgacggtcgaacacgtcggcggtcacctggccgccgccgccgatctcggcccaatagccggcgttcgcggccgcggccacgatctcgggatccacggtggtcggggtcataccgggcagcagcaccggcggcttgccggtcaggtcggtgaacttggtgcggatcttgtcgccggcgggagtgtgcaacaccttcggcgcgaacgccttccagttctgggtgcggacgggctcgtcctccatggtggacagcgcagaacgctcggccatcgtggcggcttcgaccacgccgacgccggtgccctggatcaggttgccgatgagcttgccgagcgtgttgcccgggccgaagtcgacgatccacagcttggacggatcgcaggattccagcatcgccttgacgcgggccgcccaatcgacgtggttgagcagcacttcggcggccagctcgcgcgtacgggtctccttgaagccgcaggcgtgcgcccaggccacggcctgctcgacggcatcggccatcagcggcgagtggaacggcagcgtgacctccaggtattcgaggacgggcccgaacaccgcgccgccgcggaccttctcgtcacgcagtgtctgctggcgcttgtgctccttgccggcctcgacctcgaaggcggcaaggtcctccgggtagccggagagcacgtggttgttgctggagttggtgacggcgatgctgatcgggccgcgcgggttcggcacgcgggatgcgagcacctcgacctggcgcttggtggcgccgcgcacagacagcatcggagtggcgccggcgtgctgcgcggtgagcgcgagctcgcgcgccttgcgggtgccggccacgccgatcagctcggcgatggccaggatctcgtcgatctgctggcccgcggcctcgatggagccggccttgcggatgacgttgaccatgtgcgcgccgagcacgccctgcgaatggccgagcacggcgacgggagcggtgttcgccacgtcaaggccgagaccggcggcgtcgatcagcgcgccgagctgggtgagcgcgatgccttcgacgctgacggtcgccgcggcggcggcaccgagccgtgccgggttcggcttgaagccgaacaggtcgacggcgcgtccggtggtggcaagcaggtcggcggccacgggggcgagcatcgtgttcgccgcggcgacatggccgcgcagcgtggcttcgagcgccggatcattggtcaggtcagcgagcgcaaccggccagggtgtggactgtccgccgaaagcgagcgcatgaggttcgccattgagccgactgagaaagaaattggggtctgacatgggttggtgttccttcttttatttggacattgtgcggagccgccgttgccggtatcggctcaaaatctgttgtgccgcggcgtggccgccgcggcgagatggactacagcggctggttgccgtgatgcttggtggtgcggcgcacgcgcttcttgtcagcgagcagtcgcagcgattcggcgatggcctgacgggtctgctcgggatcgatcatcgcgtcgatctcgcccatttcgagcgacaggttcgcgttgacggtggtgcgctcgtattcggcggcgagcttggcccgcagcgcgtcgacgtcctcgccggcctccttggccttgacgaagtccttgcggtggatgatgttcaccgcgccggtggcgccgagcaccgcgatctgcgagctgggccacgcgaagttcatgtccgcgccgatcgccttggatcccatcacgatgtacgcgccgccgaacgccttgcgcagcacgacggtgaccatcggcacctgcgcgttcgcgtaagcgtagatcaccttggcgccgcggcggatgatgccggcgtgctcctgatcggcgcccggcttgtatccgggggtgtccacgagcgtgatgaccggcaggttgaacgagtcgcacagacgcacgaaccgcgccaccttttcggaggcgtccacgtcgaggatgccggcgcgaacgttcggctggttggcgaccacgccgatcggccggccgtcgatgcaggcgaatccgacgacggcggacgtggcgaacagctcgtgcacctgcacgaattcgccgtagtcgacgatgcagcggatcacgtcgagcacgtcatacggctggcggtcgttgtccggcacgatgtcggtaaggcgtttcgcggtctcgcggtccgcgcgagtcgccgcataggcgtacatcgggggctgggcgtcgctgttcgacggcaggtaggcaagcaccgtacgcgcgtagtcgatcgcgtcggcctcgtcctcgccgaggtagtgcgccacgccggatttcgtgctgtgcacgagtccgccgccgaggtcgttcatgctgatcgtctcaccggtggccgccttgacgacgtccgggccggtgacgaacatgtcggagttctccttggtcatgacgatcaggtcggtcagcgccgggcagtacacggcgccgccggcgcacggacccaggatcagcgagatctgcgggacgaagccgctggcgtcgcaggtcttgcggaagatgtggccgtactgcgtcagcgcggcgacgccttcctggatgcgggcgccgccggagtcgacgatcgcgacgatcggcaccttcaggtccagcgccatgtccatcaggtggcagatcttctcgccttcggcacgacccagcgtgcctcccctgacggagaagtcctgcgcgtagacggcgatcttgcggccgtacacgtcaccgaatccggtgatgacggccgaaccggccttgccgccgttgatgtcgccgccgcggaaccggccgatctcctcgaacgagccggtgtcgagcagcagtccgagccgctcgcgggcggtcatcttgcccttggcgtgctggcgggtgcgcgcgttggattcagcgtcacgcgcgagttccgccgcgcgtaccaccgctgcgcggatcggctgctcgccctgcgcctgtgcggcgccgtccgccgagacgtgcccaggttgtttcatgacctgtttcacggccggcgagttcatgatatcggtcatcacttgccctccttgccgttcttcgcggtgcttgcggacttgccgccgtcatccaccgcgccggacttgtcgtgcgccttggcgccgtcgacgtccatcgcgaccagcgtctcgccggcctcgacgccggtggcgggcgcgacgaagatcttcgcgaccgtgccgttgaccggcgcgtacacgtagttctccatcttcatcgactccagcaccaccagcaggtcgcccttggtgacggactggccttccgcgacgttgatgcgcgtgaccaccgcctgcatgggcgaggcgatgacgccggacttgccgtcgttgtgctccttcttctccgcgatggcgtgcagcccctggcctcgcagcggctgcgacgggcgcttggctccgcgcgaacgccccgctcccatgaggttgttgacgatgtcggtcggcacggtgagcttgacgcggcggtcgtcgacctcgatgacgaagctctcgctcgtcggggccttcgcgccggcgtcctggccttcgccgctgagcgacgccggctgtcccgagcgcacggtctgcggctcatggttgaggtacttgcgctccagccacttcgtgctcacgtcgaagagatgaccatgctcggcggtgaactcatcgtcgttgaagatctgcttgaacaggctgaccggggtcggcacgccctcgatcacgagttcgtcgagcgcgcggcgcacgcgggcgacagccgcctcacggctctgcgcggtgatcacgaccttgcccatcatcgaatcgaacttcggcgagaccgtgtctccctgctccacgccggtatcgatgcgcaggccggggccggacggccagacgatgcgctccagcgtgccggaggacggcgtcaggttcgtcgccggatcctcgctggtgatgcgcagctcgaagctgtggccgcgcggcgcgggggccggtgtcaggtggccgccgtcggcgatatcgatctgctcgcgcaccaggtcgagcccgcacacctcctcgctgaccgtgtgctcgacctgcagacgcgggttgacctccaggaagtacaccttgcgatgcggggtcaccatgaactcgcacgtgcccagaccgatgtagtcgaccttgttgaacaggctgcgcgaatacgtctccagctggttgatgacctcgtccggcaggaacggagcgggggcctcctcgacgagcttctggttgcgccgctgcacagagcagtcacgcgtcgagtacacggtgaagtcgccgaaacggtcgcggccgcactgggtctccacgtggcgggccttgtcgatgaacttctcgatgaagtactcgtccaggtcgccgccctgcatcgcgtcatggttcatgtagaagcgacgcatctcgtcatcgtcgtgcacgacggtgatgcctcggccgccaccgccgtcggtgcgcttcatcatcaccgggtagccgtacgtgtgcgagaagtccagcagcgtgcgcagctcgcgcaccggctcgctgatgcccggcaccggcggcacctgcgcggacttcgccacgcgacgcgcggtgatcttgtcgccgaggtcgatcagcgcctgcggatgcggccccacccagatcgcgcccgctttctcgaccttgtcggcgaagctcggcacctcggagaggaatccgtagccggggtgcacggcgttcgcgccggaccggtgcaggatgccgatcaacaggtcctcgttgaggtatgtgctcgcgtatgtgtcacccgacagcaggtacgactcgtcggccagctggacgtactgggcgttgcggtcctgttcggagtacaccgccaccgtggaaatccccatctcccgggcggttctcaccacgcgcagcgcgatctcgccgcggttggcgacgagtatttttttgacgatatttcccatatattccactatcgccgtatgcgcgcgagtgcggagtcaagttttcgacaaaaacggcggcgatattttgtagagcgaagacaaacggccacgtaagttccggcaccgtaaccggcgaacatccacaaaaggccgtctcgacttttgtatgttcccgacaggccgtctaaggcgagggctttctatcattggcgacaacggggggacactcgccgtccgttctttcatcatcgagaggggttattcatgtccgaacgtactgtttccaccgcccagcgcggccgtatgctggcttcgaccatcggcaagccggtgctgttcgccgtcctcatgtggctcgcttcggcagctggtgagatttcgatccctggcaccccggtgccgatcacgctgcagaccttcgtcatgatgctggcaggtctgatgctcagctggcgtcaggcaggcagcgcggtggcgctgtatctggccgccggcgcggccggactgccggtgttcgccggcggcgcctccaccgccgccctgttcggcccgagcgcgggcttcctgatcggcttcctgccggccgtaatcgtcaccgccctgctgcgcggcaaggcgcgtcttgactcggctccgcacgccgcgctgaccgccgtccgctacttcggcgcctcactggccggcaacctggtggtgctgtacctgttcggcatcacgattcagtccatggtcatgcatgttccgttcacgaccgtggcgattgcgtcgatgggcttcgtgatcggcgatgtcatcaaggccgtcgtcgcgtcgctcgcggcgaccggtctggccaagctgttctgattcgcgtcgctgttgtcgcagcgaacggttctcaatagcgtttgtgcgaggatttctaacattcccgcacaaacgctcatacggaagaagcccggaattccgggcttcttccatattttttgttcatttcggacggatgcaggctcacacctttcttattgagaaccgttcgctgcgactacagcggcaatacgccgacgtcggccgtgtgcacgacatggttttcgcccgcatcgtcacgcacgctcagcgacgcgtcggcgttcagcgccgtcgccgtaccggtcagcaccgaaccatcggtgaagcgcgcctcaacacgacgtcccagcgtccagcacacgcgggaggtctcctcgcgcagccgctcggcggcggcatgcgggtctgccacgaaaccgctcagtcgggaactcagcgaccgcacgatatgcgcggcgatcatatcacgcagtgtccgggcatcgggcagcccttgcacatgcagttgcagtgacgtggactgctccgtgggcaaccggtcggccggtatcgcgaggttgatgccgatgccgatcaccagcgccgcgctgtcatcgcgcccgggcagcggcaccatctcggtgaggatgccacccagcttgcgtccctggcagaacaggtcattcggccacttgagccgcagaccgcaatcttcactggccaccccacattcggcgagcgcgccccgcagcgcatccagcgcggcaaacccggcgatcaccgtcagccagccgtttacactgccgtcggcgatcacgcccgccggcagcgtggcgatgtacgagcaggtcatcgattcgccgggagcactcacccatgtgcgttccagccggccgcggcccgcgctctgcacatcagtggccaccacgaccacaccggcacccccgtcggccggaggcgccatggtgccgtcgcgcagcatctgccgcgccagcgtattggtcgatgcggtttccgccaccgcaatcacattgtcagccacctcggtggtgcgtggcatgtttggaatgattccccttgctgtttccgacatgccttcagattatgcccgatatcgtcctacggcaaatgccggcaatggcacgatcgccgccgttcaaggcgcatcggtagaataccgtgacatgaccacagctcacatcacggatcactccgccgccaccccggcccgcggcgggtgcggaggcagcggcggcaggtcacgacgcgccaccggcaccgccctcgcgcgtctcgcgaccgtggcgcgatggacgctggccgtcgcggcctgcctgtggatcgccttgtgcgtggcggtggggccgctctactgggcagactcctcgatcgcggatttcggcgcggtgaactggttgtttgccgttgtcggattccttgtaccattcgccgccgtggtcgcgatgactcgctgggcgaacggcataccggtgttcggctggtccagcggcaagaacggcctgcatccacggcgcctgattccggcgggcgcacgtcgcgcggccgcgcggctcctggcatccgctcccggctcgtgggtcagccggaccggacggttcctcgcccggatatgcgtacgtgccaccgaccggtggtggaaaatcgcactgatcctgttcatcggctggctttgggtgccgacgacgctgctgtccgcgttcggcgccgacatccgctctcaggctcgcgagttcagctgggcctggaaccaatggaccggcctggatcagccgtatatcggattcttctcattcgtgccgatggacatctatccgaccgcgcactacatatggccgtcgaatccgacatacctgaccgatcagcacaacatcgtgctgacggtactgtatggtgccgtgctgtcggtctcccggtatttcaccgattccaacgacgtcggattcgtggtgctgtcatccgcgcagttcctgttcgccgcgttctgctgcgccgccaccgccaaccggttcttcaacctgccgtggctgccgcgccgcgccggcattgacttcacgcatcccgaacgcgggccgatggcactggtcatgcttgatttcgcgcatccggagcgcgggtacgcctcccccggcttcgcggcgcgggcatgtgccgggaacggacgcctgcccgaaggtgcctcgggatggttctcgcgtctggtgattatcctgttcttcctatgctgtccgctcgcggtgttctcgacgatctcgctgacgaaatcgcctctgttcgcgttctcgttcgtgtgggcgttcggcgtgtggtacgagctgttccgtacgtggcgaggcaagggcgacaaggtggtcaggctgcgccgtcgcagccttatcgcattgatcctggcctgcgtggtgatgctggcgagcgcgaagtacgcttggtacatcatcgtgctgcagctgattcttgcgctgctttccgaccatcgccgctggaaggcgtacgtcgtcgcgttgctgctgccggtcatcgtgctgcatggcggcgtcgtgatgctgacccgcaccggtgcgatcatcagcggcgatccgatcgaaagccacggcgtccagctgcagcagatcgcccgcatcgccaagcgcaatccgggcagcataccgcagtccgccagggaggagatcgcgccgatcttcaatctcgatcagatggccgacgcctaccagccgcaggatgccgacccggtgaagtcgtccggtatccagtcgaagaaggtgagctaccgctggcggtcggtcacgcagaaggacatggcccggttcaatagcacctggtggcagatcgtcaaggccgatcccgtcaccgccatcgacgcgctgctggcgaagtgcttcggctatttcaacccgatggatcagccgtacgtgtcgatggattactacgtgaccagcgattatgtgacagaccagaccacgtggatcaaatactggtgcagcgagtggcggcagtccatcgccgagggcgcaaagcagttcggtgagattccggtgctgggatgggtggctcacggcaacctgtatgtgatgatgacgctgctgatcggcgcggccgaagtggtgcttcgccggtggcgcacactggtcatgcatctgccgctgctgctgctcatgggcgtgatgatcaccgcgcccgcgaacaatttcgagcgacatatgctgccggtggcgttcgtgttcggattcgtggtgctcacgttctggcgggagtcgcagcgggcgcggcgcaacgcggacatccggtgacgactggtgacgcttgcagacggttcggctatgctggacggtatgaccgatttcgacacggagcatggttccgttgactttcttgacctgctgagcagtggttccgctcaggatgacgccgattcccgactggaatcggtggcgttcgcgtgtctggtcaatgggttggcggatgagcgtgccgcggcgattctggggattcttgatttttcggatgattttctgtgctttgccatcggtggcaagccgttgcacacgatggcgggcacaagggccgcgatccgcaggaccgtgcatgatctgggcggcgggccgtgcgtgacggggacgacgaacggtctgtgcgtggcgctgatcatgccgcgtgcggcggcgacgcccgatgtgacgtgtaccaatacgctgtcggcgttctcgacgaaggcgccggtgtgcctgggacctttgcgccgcggtgtcgagggtgcctgccgcacggtgcaggcggtccattcggcgattgcggcggctcccgcattgccgcaggttccgcgcccgatgcgtgccgatgacgtgctgcctgagcgggcgctgctgggagatcaggatgccgtggacgagctggtgaatacggtatatgccagtctgcagacggcggggccggacgatcctactttggaaaccgtgtccacgttcctgcgcaacggcggctcgttggagaccacggccaaggaattgagcgtacacccgaacacggtgcggtaccgtttgaagcgggccgccgaaaccactggctgggacgccgccgacgcgcgcgaagcctacgtgttacgcaccgccatcgccctgggccgcatgcataccgcctgagcgcaccgcgactgaggagcaacgccggcaacgcgccaccacacaacacacccctgaacacgccgcgatgcgcgcggtaccaagacgcaccgaaggaagcggtacaaaggtaccgcgactgagacgcaacgcaggtaacgcgccatcgcggtgtgttcaggcgtgttcagaagaggcgaagggaatcatcttccctacccttcatctcgtcataatcgaggatgaggcattcgaaaccgcggtcctgggcgaggacgcgggcctgaggggtgatggtctgggcggcgaagatgccgtggacgggggcgaggagggggtcgcggttgaggagctcgcagtagcgggtgagctgctcgacgccgtcgatgccgccgtggcgtttgatctcgatggcgacgtgctcgccgtcggcgttgagggccatgatgtcgacggggccgattgcggtggggtattcgcggcggatgagcttggagccggggccgatgcggtcgatctgttcggagagataacgctggaggtggtcttcgacgccgtccttgatgaggccgggatcgatgccgaggtcataggtggtgtcggagtagacgtggtacagggagacttccaagacgtcgctggtcttgtcggcgcagacgcgaaggatatgctcgggggtaggcccgtccgcggcctcaacagagtccggggtgacgtccttcaaagtgcagggcgcagccatccagttgagcggcttgtatgagccgagttcggagaagatcagcagactgttgtcggcctttatgagcagaacgcgcttcgcgggaggaagcgacgcactgaggcgaccggaatattcagcagagcaatcagcaacaataacgcgcacgtcacaccagtgtacagtacgcgcggaagggagggagcgcctctcggaccagtaacaggcacgaaacgtacggccgcgccgacagcgcgggcgtatcgaacgccaaaatacgggttgaaatcgccgttctgaacaattccccgtgtgaaatcgccgtttcaggatccaaaaacggcgatttcacacggggaattgcggatttcggctatttcaacccgtattttggtgggaatggtggagtgcgccgggcattgacgtgggggataacaccgagtagataacgcaaaaagggcgccgcctgcgggatgcagacgacgcccagtgcgagcgcaacggcacagccgctgccgtgccgaagagctcgctattcgataccgggtccttcagtgcggaccacgtcacggccgcgttcgacggcaaccgtgagcttgttgaaatcgaaggagatgaatccgtcactgacctcgaacgcatggcgctcgcctgcgggatccacgaccgaaaccgtgcctcccttgatcaccgtgagcaccggctcgtggtcggccagaatacccatctcgccttcggaggcggggatggtgacggacttcgccgtgccgtgccacaccgggtgatcggcggcgacgatgttgacctgcatcagggcctttgacgattcagccatcactcaccaagttccttctgcagatcgtgccacttcttttcgaggtcgtcgatgccgccgatgccggagaacgcctgctccgggacgtcgtcgtaaacgccgtcgcagatgcgggtgaaggcctcgatggtctcgtcggccggcacgtaggagcccggacgaccggtgaatttctcggccacgtagaagttctggccgaggaactgctcgatgcggcgggcgcggttgacggtggtcttgtcctcttccgaaagctcgtcgataccaatcagggcgatgatgtcctgcagctccttgttacgctgcagaatggccttgacgcggttggcgcagtcgtagtgggcctggccgacgtaacgcggatcaaggattcgcgaggtggagctcagcgggtcgacggccgggtagatgcccttggatgcgatgtcacgagaaagctcggtggtcgcgtccaggtgggcgaaggtcgtcgccggggccgggtcggtgtaatcgtcggcgggcacgtagatggcctgcagcgaggtgatggagtggcctcgggtcgaggtgatgcgctcctggagggagcccatctcgtcggccaggttcggctggtaacccacggcggagggcatgcggcccagcagcgtggagacctcggagccggcctgcgtgaagcggaagatgttgtcgatgaacaacagcacgtcctggttctgcacgtcgcggaagtactcggccatggtcagtgcggtcagcgggacgcgcagacgggtgcccggctgctcatccatctggccgaagaccagtgcggtcttctccagaacgccggcctcgcccatctcgccgatgaggtcgttgccctcacgggtacgctcgccgacgccggcgaacacggacacgccgccgtggttctgggcgacgcgctggatcatctcctggatcagcacggtcttgccgacgcctgcaccaccgaacagaccgatcttgccgccctgcacgtacggggtcagcagatcgatgaccttgatgccggtttcgaacatctgggtcttggactccagctggtcgaatgccggcggcttgcggtggatgggccagcgttcggtgaccttgatggtctcgtcggccttcttgttcagcacgtgaccggtcacgtcgaacacgtggcccagggtcacgtcgccgacgggcacggaaatcgagctgccggtgtcgtgcaccgaagcgccgcggacgaggccgtcggtgggcttcagggccacggcgcgcacggtggagtcgccaaggtgctgctcgacctcaagcgtgatcgtgtgcgcggtctcgccttcctcgtgagcgccggtgttggtcagctcgacggtcagggcgttgtagatatcgggcaggtggcccaccgggaattcgacgtcgataaccgaaccctggatacgcgtcacacgtccattgatcggctctgcagccgtctcgggagccgctgtggtctgattgtcagccatatgcgttcctactcttcctttgtgttcagcgcgtcggcgctgccgatgatttcggtaagttcctgggtgatggacgcctgacgggaggcgttcatcttacgggtcagcgagtcgatcaggttacgcgcgttctccgtcgccgtgtgcatggcgttctgcctgctcgcggtctcggacgcggccgcctccagcaggcattcgtgaatacgcgactggatgtacttcggcaggatggcatccatcaccttgtccaggctgggctcgaagcggtacaacgggcgcaccttggagcttgcggcgttgtcgccctcactctcgcgcgacatgcccgggccggattcgaccttggcctcgaccacttcgacgggaagcatacgcagcacgcgcaccttctgcaccaccatgttgatgaactcggtgtagacgatgtagagttcggagaccccgccctcgctggccggcttcatgtaggcggtcatcagtgcgttggagatggcctcggcgatttcaacgcccggcttgtcggtatccccctcccacgtgtcggcgattgcgcggttgcggtacttgtagtacgtcacgccgcgccggccatacacgtagagttccggctgcttgccggcgtcgtcgagtcgcgtgagcagttcctcggtctcacggatgatcgacgaggtgtatgcgccggccatgccacgatccgccgtcaaggcgaggacggcaaccttggggttgtcctcctccttcttgacaatcggatgcgtgatacgggtgtgggctaccacagcctgaacggcatcgaaaatcgcatcggcgtacggcttcgcgttcagggccacgtcacgggccttggcgatatgcgaagacgcgatcatctcctgggcgttgaaaatcttctccagcgatcccgtagaggcgatcctgcccttcaatgcgagttgcgatcccatgggctacttcttttctccagccatcgggtgcttggtcggatcgtgcgcgggcttgtcggccttggcgatgatcttctcctgctccacgggcacgggcttgcgcgtcgaggacttcttcacgaccagcggcttgccggccttggtcacgtacgtctcgcggaacgcttcgacggcctcgtccaaggcggcttcggtgtcaggcgtgaagttctcggtctcacggatggtcttgaggatgtcggtgctgtgctccaggtaatcgagcagcgcgtgctcgaacggcagcacgtcgcccagcggcagatcatccatcttgccatgggtgccggcccacacggagacgacttcctgttccatcgaatacggcgagaactgcggctgcttgagcagctcggtcaggtgcgagccacggttcagctggttcttggacgcggcgtccagatcagacgcgaacatcgcgaaggattccagcgaacggtactgcgccagcgagatcttcagcgtgccggagaccttcttcagggccttggtctgtgcggcgccaccgactcgggagaccgagatgccgacgtccacggcgggacgctggttggcgttgaacagatcggactgcaggaagatctggccgtcggtgatggagatcacgttggtcgggatgtacgcggacacgtcgttcgccttggtctcgacgatcggcaggccggtcatggaaccgccgcccagatcgtcggagaccttcgcgcagcgttcgagcagacgcgaatgcaggtagaagacgtcgccagggtacgcttcacgccccggcgggcggcgcagcagcagcgagatcgaacggtaggcttcggcctgcttcgacaggtcgtcgaagacgatgagcacgtgcttgccgtggtacatccagtgctggccgatggccgagccggtgtacggcgcgatgtacttgaagcctgcggaatcggaagccggggaggccacgatggtggtgtactccatggcaccggcctcttcgaggctctggcgcacggatgcgatggtcgaacccttctgaccgatggccacgtagatgcagcgcacctgcttcttcgggtcgcccgtctcccagttcttcttctggttgatgatagtgtcgatcgcgattgcggtcttgccggtctggcggtctccgatgatgagctgacgctggccgcggccgatcggcgtcatcgcgtcgatggccttcaggccggtggacagcggttcgtcgacgggatgacggtgcataacgtcaggagcctgggcttcgaggattcgacgcccttcaatgcccttgatttcacccagaccatcgatcgggttgcccagcgggtccacggtgcggccgagatagccgtcgccgacgggcacggagagcacttcgccggtgcgtcggacctcctggccttcctcgatacctgcgaaatcgccgaggataaccacgccgatctcacgggcatcaagattgaacgccaggccgagcgtgccgtcctcgaaggtcagcagctcgttggccatgcaaccaggcagtcccgtcacgtgcgcaatgccgtcgccggccgtcgcgacatagcccacttcctgggtgggggtgtcactcggcttgtacgactcgacgaaatcatcgagcgccttgcgtatcgtggcgggatcaatggtaagttctgccatgatcactccttattgttggaaaatttcatgtcgggctccgtcgccgcgtgtggcgcggcccggaaccgtatcgtcaggctttcgcctttaccgtgcggtgcagctgctggagctgggcgaccacggtgttgtccgtgacctcgtcgccgacctggatgcgcatgccgccgaggaccgtggggtcgacgaccgagttgatgtgcaccggatggtcgagcttcgcggaatatacggcggtcagtcgcttgatctggtcgatgttcagcggcgacgcggtggtcacggtaatcatcgactcgcccatgtggcgcgagaacttgttgatcagccactggatggtctccagatagcgccggttgcgcgggttgcacgcggcgtgttccgccagccggagcgtgacctcgttgaactcggtcttgcccagcacggcgttcagcagatcgatgcgcgccttggcgggtacgctgtcgtcattgagcttcgaacgcagaaccggcaggttgagcagcgcggaatgcagctcggccagttccacggacacgcgcagggtgacgcccgcggcatccgcgtagtacatcatggcgtcaacgccgaagtcttcgacggcgttggcgatgtgcgcggcacggctccatttgcgaccgaccagatcgctcatgatctccagggtcatgggatgggcctgggcaccgatgagctccttgagcacgccgatcttgtcgtcgaccggacgtgacggatcggtgagagcgcgttcgagctgcacggtgtggtcaagcacgttggtgatcgtgaacagttcgttgccgatacgccatgcgtccttgccggtcgagcgcagcttgggcgccaactcgtcacgcgaaacgcgatccgagatgcgggatgcctctcctcgcattggtcacctccctttccggaacgccggaatcacttcttgtcgttcgtgtccaggtcgtcgatcatcttgtcgatcatcgaggactgcacgtcgtcgctttcaagcttggcaccgagaatcttgccggccagggccgtggcaagagtaccgacttcgcccttgagggagaccagcgcctgctgctgctgcgactcgatggagcgctgcgcgttggcggtgatctgggcggcgtcggactccgcgcgggagcgtgcgtcggcgatgatgtgggaagcttcggcacgggcgtcgtcacgaatcttggaggcttcgacgcgagcggtgctcagctgggcctcgtacttgctcttggcggcgtcggcatccttcttggactgctctgccttggcgatgttgccttcgatcttcgccgcacgctcatcgaagatggcgttgaatttcggcatgaagaacttgtggaagaacagcgcgacgatgacaaggatgatcagggaccacacgatgtcgtagacctgcggaatgaacagcttgaggccgtcacttgcggctattgtcatcatgaagccctcctttcaatgtcgaataaacgtgtgaatcgtcgcctgtcgtctcacttaacgatcagggcggccacgaagccgagcagacccagcacctcgaccagtgcgaggccgatgaacatgatcatctggatcttgccgctcacctcgggctgacgggcggtggactccatcgccttgccgaacaggatgcccaggccgaggccggggccgagggtcgcgaggccgtagccgatgacggaaaggctgccggtgacctgagcgagagtaatgatgtccatttctgtttcctttctaacgtaaccgttaaaaaaacttggttaatttcttcagttgtctcgggaattgcaaagtattcgtattgtccgtggtgagtctcacgcgggtgcggctcattcctccgggtagctcatgctgatgtacaccgtcgagaggatggcgaacacgtaggcctgcaggaaggcgacgaacgcctcgaacagggtgagcaccaaaccgaagacgaaccacagcgcgccgacggggatgccggcaagcttattggtcgcgtcgatgacccagtactgtgcaaacgccaggcaggatgccacgagcaagtgcccggagatcatgttggcgaacagacggatggtcagcgatgcggggcggatcagcaccagctcgcacagctggatcggcgccagcaggatgtacaccggccacggcactcccttggggaagcactcgtcgcggatgtagccccacaggcccttctcgcgtgctgcggtgatccagtactggatgagcacccagaccgcgaacaccagcggcatgaccactgtggcggtggccgccatgttcatgccggggatgatgccgcacaggttgaacacaaagatcgtgaagaacaacgtcgaaatcatcggcacgtagcgcttgccgcgcagctcgcccatgacctgatatacgacgctgtcgcgcacgaagtcgatgcccatctcgaccacgccttgccagcggccggggatgagcttggcgcgcttcgccgtgataccgagcaccacgagaagcaccacggtcgccacgatgcggatcaatatgatgcgattgatcgcgaagggggttccctggaacaggatctcgggaggaagaaaatcattgaccgttggcagttcgggaccgctgtcggccgccaatagtgcgcccgtaccgaccgcatctaccatatcgcgcctcctgctctcattatcagctgtcagtttagcccaacggttgaggcgaatgtgacgtttggatatcgtccgtccagccgttatcgaagctgcccgggcataagaccgaccaaccggagctcctgcccagacattccgctccgaatgactaaatgattatcctatgaccaccttggacaacacgcaacacgccttattttccaagggctgtacggcgtttcttcgccaaattcgtgagcgttaacatattggtcattgtctcattatttggacggttttttaaacaccactcataaggcatggacaaaagaggccggtattccacctattgaacacggcgatggccctcttttgtacgccatgtggacaccaaaccgtgctaatgcaacaaatctcgaatctccgaccaattacagcgggattccgaggtcatctgcgccctccagatccgaaagaccatcaacggggagccgaccgggatggtcccagacccccgtcaaacgaccgcagcgcaggcgagaaccatcattcgccacgtatcacgccgtagtcgtcatggacgaacggtgagaaatcgtccttgcgcgggccggagggcgcgtggcggaaacgatcgatgccaagccggcgctccgcccgcaatccgggcacttcagtgagatcgtacggcgtggtctgatacacccagttcagccaattgcgccacagcagattcgcgtgcgatcgccatgcgaacaacggctcaaggtgcggatcgtcatgcgggaagtagttgtgcgggaacgggacgttgctcatccccttcgccatgtcgcgctcgtactcctcctggagcgtcgtcttgccgtactcccaatggccgagagcgaacacttcggagaaatcgcgagtggcgatcaggccaggcccggactgcggaccccaagtgagcacttgcaagtcgggattcgccgccacgtcggcctcgttcacacccgccagacgggagtgcggctgcagcgcgatctcgtcgaaaccattggtcaggaagcagtactcgtcctgcaggtactgcgggaacaccccgaatatcttctccggcaggtcgaccttgcgcacgccataccggtagttgagcgcccccatcgcgccccagcacaggtacatggtggagaacacatgggcgctcgcccagtcgagaatcgacttgaactcgtcccagtaatcgacctggtcgaacggcaggtgctcgaccggggctccggtgacgacgaaaccgtcatagtagttgtcgcggaaggcatccagcgtctcatagaacttgaccagatgatcgtgactgacatgggtcggttcatgggtggatgtcttcatgaagtcgatttcgacctgcagcggcgatttggagatcaggcgcagcagctgcgtctcggtttcgaccttcttgggcatcagattcaggatcaccaatttgagcggtcgcacacgctggcgctccgcctcgggcttctccagggcgaagatgcgttccgagtcgaggatggcacgcgcgggcaggccgcttgggatcttgataggcatgttcttattatggcaatggccgggatattgatacgccgtcaggttatcgccatgagttatgaccggttatcaatcccggcatttcactcagcgcaaaaatccgacacgccgatttgacaatctcgcattctcccctatcttagatagagctgtttgaaaacagccggcgcggggtggagcagctcggtagctcgctgggctcataacccagaggtccatggttcaaatccatgccccgctaccagtgcctccggtttcacatcaaggaaatcggaggctttttctatatcatccatgttccatcgggtgcgcccactgaacttctgggatagagtcggcgcggcaattcccatagcctgcgccagatccttctgagaggtctgtcgaatggcgataagaaccttcatgttgtatgtaacgcgatcctgaaggctcaactcttgcttctgcgcctttaacgccggcgagaccatcactgcagtcatgtgaactagattagcaatgcatagacttactttcaagtcttggattaggaatttacaaaccatgatattgttacacatatcttttatccatacataaaactgatttgtatataactaatacggagtcgagaatcaaaaccctgatcgtagtacgcggaaggccgcgatcttgtcgaccggcgcgatgcctccagtgacgctgaccgccccgaatcccggaaacgacgatgtgcgccacatcgtgctcgggatgatcgacggcaggcattggacggcgattacagccaaacgcggcaagcgcatccgcatcatacccgtgcaccgatcgcgcaagaacgaggaggcataccatgaaagccaaaaaatgatgccaagcgatcaccagcgaccagtttgaggagatgttcgacaacggcgaggacatcctcagctatgtcgatctcggcaatcccgtagtcgaacatcatcccccgctggagaagcgaatcacgctgacgatgcccgcatggatggtcagcgaactagacgaggaagccgccgagctggcaatcagccgcaacgccgtcgtcaatacatggatcgccgaccagttgcgcaccatgcgacgtcgcgaaaacgcccacgcctgacccatataccattgaggcccatggttcaaatccatgccaaatagaaggctaggaattacaagattcctagccttcctgttctattgcgcctttctcaagtgcctcaaaccatccaccggtctcgctagacaaccttcgccagcggcagcgtcagcgacgggatcggcggcggaaggccagggcaccgatggcggccgcggcggctccggatccgacgacgatgatggcgacgacccccgcaccggtatgagacagcaccggcttctcgggctctggatccgccttcggctcagcgggtggatcatcaggcacttcgacggttacggtctccccttcgacgccgagctcatgcgaaaccagcacatcaccgtcacgcgagcgaagcgacgctctccaatacaccagtcccgccttcggcgagcgcacctgcggactggcgatcgtctgctcgaacagcgtatggtccacttcggcgcgggcctcgtcaagcagcacgccgttcatgccgggcaccgccccttcctccaccgcctcgtacgccgtgaacgtcacataggccccttcgggcacatcgcccacaatccgcgccgtatcgcggaacggctcatcgacccgcacaatgtccggctccacctgcgtggtcagcgccggcttgcgtggccgtgccacatcccatatgcgcacgcgctcccacgcgtcatcgtatgcgctggacgccggcatcacccggtcatcgccgtcgaagctccaaacgaacacgtaccatccgggcgattcggccacgatgtgcaccggatcgccatgagcgtccggcaccccggcgcccactcggatacgcccgttgaccgccggataatcccacacgccaatcaaccggtgattgctgtcctcggccggcggcgtctccccctgaggccggtacgcctcgtcgccggcggaatcattcggatcgcccgcccaccacacgctcacctgcgccatcgcccggtcagcgccgatgccaagcttgacattgccgtcaaaggatccgtgatcatcggggaatccgtcgaccgtaatggtgtcgctcagttcggaaccaaccacgccggtatgctccgtgaccgtggattccacactcacccgagcacggttcgaattcgtctccgtgtattccaggaacccgctgaccacatccttacctatatattgtcgcgcagtatcgctcaacttctcgacttcgaacgcccacacccatgtgccgaatcctccacctcgcggcgcctcatacgccgcgtcgccgcccggctcggccgttgctctcacgtccacgcgctgcccgggagcagtgaacgacgcctcgccataagcggacggccggaatcccattgtgcccagcctcgcgatgaactccttcgccgtctcgtcggcaccaggcatgaccggctcggacagatcgcccacgccgagcccgtcgaaataccatccggacgcccgcaactccaatccggacgcccaggaatcgccgtcatccaccccggacgtgacggtatccacgaccggctgcccggcgtcgaccaccttggccgcgacggcggtgcccagtgtgggcacgaactccttgcggaccgagaaattcaccgccttgccgctcacctgcgaagagccgccgtaacgcaccagatcctgacctcccgcgactgcgaacacgtccacctgcttgcggtcatatgccacactcgccttcacttcaccctcgccggtcgccttccacgagtacacgatcggctccgccccggatatcccggtcaccgtcgcgctcccgttcgtgaacaccgccggaccgttcagcgtcgcggcgtatctgatcccggcgatcgtcttcccctgcgcattggtcaccgacaccgtgacgcgcccggtccgcgtgccttcggcgtatgtacgcgtcaccgtcgcattcgccggggcgttggatcccgcctcctcccacatctgctctaccttgcgccgcagcgtcggattgtcgcgcatgacggacacgcgccgggatttccacgtgtccggcttcaggtccagcagatcatgggccagcaccgcgattgccgcatgctccgcggccgtcccgtcgcgataatggtccatcagccagccgagccggcgcgcggtgtcgtcgtcgcgcagcttgacgctctcccccagctggtattcgacgcgttcgtcagcctcgatgcagtaatagttgttcgtcgaatccttcgccatgacgccgatgacctgctcgccgccatgctcatagcgcagaaacgtgccggcatccgccctgctcaacgtcaccgccgcggccggcatggcggcaaacaccagcgaggccaccaatgcgagagccatgacggccgcgacccccagcgcggcctgacatcgcctgaatacaaccatgttcatgatattcccttcctgaaatcccgccgcgtccacgatgggcggttgatgacaccatgccatgccggacgccgtcggccaccggatttcaggcaatgtggtcgaaggctatcccccttcggcgtgttgtggataactccccacgacagttatccacatttggcggttctcggcatataagacagagggttatccacaatcgcccattggccatcagccgtatacaatgggcggtatggcagaagaaaagaaaggcgcgtcagcgcttagcagtagttcatctcgatcagccacatcgcattcggacgacaagaccgaagcgaaatccgcaacccgtcacacttcgtcgggcaagcagtccacatcacgtaccacctcgccgcgcaagcgcacgacggccaagacgcctcgcgcctccagaacgacgaaagccgccactgcggccgccgtcgccaacggtgaggtccccgcgcagtccattcccgtcgcagacccgtcgcagttcggacgcatcgccgtcatggacgtgacgccgaacgaggaatccggccgtttccccgcccgtgtcgagctgggcgaaccgttcaaggtcaccgcgcaggtcttcatcgaaggccgcaccaaagtcggtgccaccgccatcgtgcgcaaccaccgcggcaaggagatgcagcgtctgccgatgacctgcaccaaccccggcctcgaccgctgggaggtcatgctcacctgcggcgagcacagcgacgtcaagccgtggcagcccgaattcgccgccatcaagcgccagctgggcgaatggagcgtcaccatcgaaggatgggaggacacctacaagtcctggctgcatgacgcggccatcaaagtcaaggtcaacgacgacgtcgagaacgccctcgaatccggcgcgcaattgctggaacgctgggcgaagaccgccgacgccaagctgagcgcagcgcagcgcaagacgctcgtcgccgctgccgccaccatgaaggacacatcgcttacgcccgaggcccgtctcgccgcggcgaccagcgaaccggtcgcccagctgcatctgaccaacccgctgcgcgacggcgtctcgcccagccagccccagcgtttcctcgtgcagcgtccggaatccagcttcgccgcatggtaccagttcttcccgcgttccgagggcgcctacgtcgacccggagaccggcaagatcgtccaaggcacactcaagacgtcggtgtccggcctggaacgcgccaaggccgaaggcttcgacatcgtgtacctgccgccgatcttcccgatcggcaagacgaaccgcaagggacgcaacaacgcgctggaggccggccccgacgatccgggctcgccgttcggcatcggttccgagctgggcgggcatgacaccgtcgacccgctgctcggcaacatggacgatttcaaggcgctcgtcgccaaggcccacgagctgggtctggaaatcgcgctcgacttcgcgctgcagtgctcgcccgaccacccgtgggtcaagcagcacccggattggttccgccacaagccggacggctccatcgccttcgcggagaacccgccgaagaagtatcaggacatctacccgatcgacttcaacgccgacatgcccggcatcgagaaggaagtcgagcgtgttctcgaactgtggatcaacgccggcgtgacgatcttccgcatcgacaacccccacaccaagccggtgcgcttctggcaggacgtcatcgcggcggtcaccaagaagcacccggagatcctgttcctggccgaggcgttcacccgcccgggcatgatgcgcgcgctgagctacgttggattcacgcagtcgcactgctacttcccgtggcgcaacaccaaggaggagctgggcaagtacctggagaccacgaacggcgacgacggctactaccagcacaacacgttctggcccaccacgccggacatcctcaccgcctacgtgcgcgacaacggcatcgccggccacgctgtgcgcgcggtgctcgccgcgatgggcagcccgagctggggcatctacaacggcttcgagctgatcgagaacaagcagcgccccggtttcgaggagcagatcgacaacgagaagtacgagatcaaggtgcgcgactggtcgaccgccgacaagtacggcatcgccgagctgctgaccaacctaaaccgcgtccgccgcgagcatccgaaggcgttcagctaccacaacctgacggtgctggaatcctccgacccgaacatcctcgcattcgcccgccacacaccggccgagctgaccggcaccggcaagccggagacgctggtcgtggtggtgaacctggacggtcacgaggcgcatcaggccatggtgcatctggagctgcccgactacggcatcgatccgaagtggggtgcgcacatacacgacgagctgaccggccgcgacttcgcgtggagctgggacaacttcgtctcgttggcaccgtgggccgatgtggcgcacattttcaccgtggtgcatgaggactgagaacgcatgagggacgcgcggccggcaggctgaccgtttcggtgatggggcccgtcgtttcggcgacgggctccatctgcgtttttgggcgaaatcgtggcgcttccggcgtacgacggggtattgtggagtgtgattatgtcaatcgactctaaggagcaatatcatggcagaaacgttcaacgttctcgttgaaatcccgcgtggttccaagaacaagtacgaagtcgaccaggagaccggccgcatcaccctggaccgtgagctgttcaccgccatgggctacccggacgactacggctacatcgaaggcacgctcggcgaggacggcgatccgctggacgcgctggtgatggtcaagaactccgtgttcccgggctgcgtcatcgagtgccgcgccgtcggcctgtaccacatggaagacgaagagggcggcgacgacaaggtgctgtgcgtgcccgccgacgtgcgctacgacgacatcaaggacgtcaacgacgtcaacgagtaccacctcaaggagatcaagcacttcttcgagcagtacaaggccctggaacccaacaaggaagtcctccccggcgactactggaccggtgcggacgttgccgagaaggaaatcaaggaggcgcgcgagcgtctcgcgaacgcgtcgaagtgatttgcttcaggacagtccggcgggctgtccggcggcaacgtgcgaggacgcgacagcgaccgagccaaccatgagccggccgaaggccgtcctcaattgcaggaccgttgccgagaaggaaatcaaggaggcgcgcgagcgtctcgcgaacgcgtcgaagtgatttgcttcgcttccgcctccgctggcgggggctgtcagccatcggctgactgggggcttaagtgccacgatcacccccagtcgctccgtgacagcccccgccagcggggcattatattatcttattatcttatcgaccacagctttctggctcgcctgtcggctcgcactcgcctacaagcagattccgctgtttgcttcacggttcgtcccgccagcggggcgatgttgtgttacagtagtgccttgtagttttcacgacttgcgaacagcattcgcttggattcaaagccggcttgctggcccggcagttctcaaagtccgtgccccctaggcgtaggcggtttatccgtcgaggcccatcccccggggaagccggcgggatgaacctttatgttccagctatgattgagatactgcttatttccgtatccgtcgccatggacgctttcgccgtctcgatcggaaaggggttgaccgtcacgcgcgtgcggccggtcgacgtcatcaagaccgcattgtggttcggcggcttccaggcattgttcccgcttctgggctttttcgcggccaacacgttcagcaaatacgtcaccgcggttgatcattggatcattttcgcgctgctcgcgttcatcggcggcaacatgatccgcgaggcgttcggcgaggaagaggagaacagccgggagacggcccagttcgactggcgccatatgctgccgctcgcagtggcgtgtagcatcgatgcgttcgccgtcggcgtgagcttcgcattcatgcaggtcaacatctggttttcggtgatcgtcatcggcgtggtgaccggcgcgttctccgctgccggcctgtatatcggccgcgtgtttggcgcacgctggcagaagccggcgcagatcgccggcggtgccgtgctcgtgctcatcggtcttaaggtgctgcttgagcaccttggcttcatagcatggtaacgcaacgagactgaaaatatgcggctgtcagcgtccgtgttcgggactttccgtgtttggatattgccgggacgatgaggccatcgtcttgccggtgcggatttcgtcgtggcgcccaaggggacatgtcttccccgcgtgtgcgtcattgcgcgcagccgaggtcctcgacccaggctcctccatgcgagccggtcgccggagggcgggccgtggcgaccgtctcgatcaggccgctcatgatggcgacccttcgccgacgaactccaccgaccgaaagaaagaagcgcgttggctgaatgacgggtacggactccccgcatcgcatactggcgaagaccaatattccccgccgaagaaaaccgtcaaatatcagaagatcagctgcatgacgaatgacgcggcgaacacgagcagaccgctgagcatcaccggcagcagcccgatacccagccacggcgccggagcagccggatccggatccgcctcgcggctccacgacaccgagcatacggcgaacagcaccgccactaccacgaacgccgcggccacgatgatgaatctcgtcagcagcccgttatccggcgacgcggagcccatgtcgatgagatcgggcacaaaacaccatcccgcggcgctgacggagaccacggcccccgtcatgcagtgcgacagcgcgcgaatcaggtggctgcgctccgcgcgcaccatctgccggccgaacgcgatgatcgtcgccgcgatcagcagtatcgcgaagcacgccgcccaacgcaccagctgatacatcaccagacgtccatcatccgcaagacgcccgccctcgtacgcggggtaaaacagctggctggccaacgacgtccgcgcgcacagaatcgacagcacgcccgcaaccgcgccgatcaggcggtcggcaatgccggcacggaacggccacccaacctggaatagcacgagcagcaccacggcgagcgcgatcgcaaccccttgcgccacaccgccctggttcccgaacgtgaactccagcacgcccgtcacgccgaatagcaccacgtacgccaccgcctggaccgcaagtacgcggccaatcgagcttccggtacgctgttcgccgtcgcccatcgtcatcacactccacaaatcgcaatccgaggcagcctcgcgaccgccattccactaactctagcctagcgtcggctgtccacattatgcgcctacaatatgaccactaaccatatgggtactacggttatccatattcaggaaaggggaagcggttgactgatttgacgctgatgacattcgcgaacgaccctgccaccgtgcttccctcacttgcactgctgtcccaccgcgtgcgcgtgctgccgatggacgccgcaagcctggtgaagatgccggagaacaccgtgctcttcctcgacgcccgggatgacctcgccacggcgaagacgctgtgccggctgattcacgcttccggcctggccacgccgatcgtgctgatcctcaccgagggcgggttcaccgtcgtcaactcgcagtggggcatcgccgatgtggtggtggcctccgcttcacccgccgaggtggaggggcgcctgcgactggtgtcggaacgcggcaatgcgccgatcacgggcgccagcaccacggtcgattcggagcgcaccgaggatggccagatccgttccggcgatctcgtggtggataccaacggctacacggcatcgctgcacggcaggcccatcgatctggcgtacaaggaattcgaactgctgaagtatctggtgcagcatcccggccgtgtgttcacgcgcgcgcagctcctgcaggaggtgtggggatacgactattacggcggcacccgtaccgtcgacgtgcacatccgtcgcctgcgcgccaagctgggcggcgaatacgaacatctgatcggtaccgtgcgcaacgtcggctaccgtttcgacccgcccgagggcgagggagacaagtcactcgcggctccggcggcttccgacgacactgacgccgacgcccagtaagaccggcgcatcatgccacgcgaatccaaacgggcacgcatccagcggatgcacgaggagtacgcattgctcgtcgaggcgttcccgcacccgaaatgcgccttggatttcacttctcccctgcaattgctgatagccaccgtgctcagcgcccagacgaccgacaagcgggtgaacaccgtcacgcccgagctgttctcgcgtttccccgatgccgcatccctggccgcagcgaatccgcaggacgtcgaagacatcatccacccgctcggcttctaccgttccaagaccaagcatctgctgggattggccgcagtgctgcgtgaccgtttcggtggcgaagtccccgatacgatggactcgctggtgacgttgcccggcgtcggccgcaagacggccaacgtggtgctgggcaacgcgttcggcgtgcccggattccccgtcgatacgcatgtgatccgcgtgacgggacggctgcgctggcgcggcgactggaactcgtccagtccagatccggtgcatatcgagcgggagatctgctcgtatttcgagccgtcgcagtggaccgacctgtcgcaccggctgattctgcatggacgcgccacctgtcacgcgcgcaaacccgattgcgaggtgtgcccacttcatgacacctgcccgagctcactgatatagaccaagcggacggacccggccggtatcccacgcatcagggatcccccgtcgacccgtttaccccgggcattacactcggagccatgcagcacagcgcacggcatacctccatcagcagttcggcgaagtccgccatcatctttgtcatcgtcgcgggggtgctcggctgcgccgtctggctgggctggtccctgctgcaccgcagatacacgctgcccaccttcagcggcctgcaatcaagcgccaaggtgagcgtcggcatcaccggcgccccggaatcattggatatccggacaaccgacgacgattcgctcgaccgcgtccttctcggcaacgtctatgagacgctgctgaagcgcgatgacaacaacaagatccagccgtcgctcgcctcctcgtggaaggtgtccgaagacggcaccacctaccgcttcaacctgcgcagcggcgcgacgttcgccgacggcaccacgatcacctcgtccgacgccgtatggtccctgcagcagatcatcaccaagaagtatgtcggcagcgacgaactgtccgcgctgtccaacgtggagtcggacggcaacagcacgctggtgctgcggcttcgcgaacccgacccgcggctgctcgccaagctcaccacgcgcatcggcatcgtctacaaccagcgtgagaacatcgactacgcaaagcaggccagcgggtccggaccgttcaccgtctcccaatggcaatccggcaagcagctgacgctgagccgcaacgaccactattggggtagcaagtccaaggccaagaccgtcaccgtcaacttcgcggccgacaccacggagctggccaaggctctgaacaacggccagatcgacgcggccgtcgcgctggatcagtccgccgccgacgcggtgaaagatgacggcatcgtcaagaagcagggcgtcagcaaccgcaaggtcgtgctcgccttcagcaacaacacgcagtccatcctttccgacaagcggttccggcaggcagtgcgctacctcatcgacaagaacgcgatgaccgaggcgctgggcggcggcacggtcatgaccgggccgctgtcaccgctcgacgacggatatcagaagacggatgagacgttcggccacgacatcggcaagggcaacgacctgatcaaatacttccgtttccgcgtctccagacgaccgctgaccttcgtctatccgaaggaatacggctcccagatcggcgaacaggtcaagcagacgatgtacgccgaacccgcgtattcggacgtgtccgtgtcaatggtcgacgatgccacatggagcaagaccgtgacgcaggaccgccaatacgacttcacgatctacgagaccgacggcgaggacgatctggacctcctgatgaacagcaactcgtacatcggcttcgtcagcaccgactcgcagaacgcgtggagcaaggccctgaaatccttcagcagcgacgactacgcgaagaacttccagtcgttcatcggcacgctcgacgacgattcgccggtggactggatctgcacacgcaagccgatcagcgcgtaccgcagcaacatcaccggagtgcccgtcaacatgacctacacgcagctgccgctcgccgatatgaccaccacggactgattcgggtccatgcgcccggacccgcccgccggcggacgcagccgcgcggctgttgtcacgattgctttctagactgtcgcttatgaccgaagagcaggataacagcatcatcaaggcacacctcaccccgttgcccgacaaggtcggcgtcgacgggctcgaagacaagtggcgcggcgaatgggacgaggacggagtctacaagttccagggaacccgcgaccgcaaggccgtctattccatcgacaccccgccgcccaccgtatccggccatctgcatgtcggccacgtgttcagctacacgcacaccgacgtgatcgcgcgattcaagcgcatgcaaggctatgacgtgttctacccgatgggctgggacgacaacggcctgcccaccgagcgccgcgtgcagaactactacggcgtgcgcgtggacacgtcgctcaagtacgatcctgatttcaagccgccgttcgagggcaccgacggcaagaagatcgacgccaaggatcaggtgccggtctcgcgcaagaacttcatcgagctgtgcgagaagctcaccgcccaggacgagaagcagttcgaggcgctatggcgttccctcggcctgtcgatcgactggtcgcagacctaccacaccatcggcgagcacccgcagcgcgtggcgcagaaggcgttcctgcgcaacctcgcgcgcggcgaggcgtatcagcaggacgcgcccggcctgtgggacgtgacgttccagaccgccgtggcccaggccgagctggaaagccgcgaataccccggcttctaccacaaggtcgccttccgtttcgaggacggcacgccgatctacatcgagaccacccgtcccgagctgctcgcggcctgcacctcgctgatcgcaaacccgaacgacgagcgttacaagcagtatttcggccagtccgtgtactccccgctgttcaaggtcaaggtgccgattctcgcgcacccggccgccgagatggacaagggcgccggcatcgcgatgtgctgcaccttcggtgacgtgaccgatgtcgagtggtggcgcgacctgaagctgccgacccgcccgatcatccagcgcaacggccgcatcgtcatggacaccccggattggatcaccgacccggccggccgtgagatgttcgccgcgaccgccggcaagaccacgttctccgcccgcaagatcatcgtcgacgcgctgcgcgaggccggcgacctggacggcgagccgaccccgaccaagcgtatgacgaacttctacgagaagggcgacaagccgctggagatcgtcacctcccgtcagtggtacctgaagaacggcggcaccgacgccaaactgaacgccgagctgatcgagcgcggcaaggagctcaacttccaccccgatttcatgcgcgtgcgctacgagaactgggtgcatggcctcaacggcgactggctgatctcccgccagcgcttcttcggcgtgccgttcccgctgtggtacccggtcaaggcttccggtgagccggattacgatcatccgatcactccgagcgaggaccgtctgccgatcgacccgaccaatgacgtgccggaaggctacgacgagtcccagcgcgatgtgcccggcggcttcaccgccgagccggacatcatggacacgtgggcgacgtcctcgctcactccgcagatcgtgacccgctgggaggagccggacgaggcttccaaggcgctgttcaaggccacgttcccgatggatctgcgtccgcagggtcaggacatcatccgcacctggctgttctcgaccgtggatcgcgcccatctggagaacaagtgcctgccgtgggcgcatgccacgctgtcgggctggatcctggaccctgaccacaagaagatgtcgaagtccaagggcaacgtcgtcgtgccgaacaagccgatcgagcagttcggcgccgacgcggtgcgctactgggccgccgcggcccgtctcggcctcgacgccacgtatgacgaaggccagatgaagatcggccgccgtcttgcgatcaagctgctcaacgcctcgaagttcgcgctggccatcggtcgcgaggacgagaaccatcatgtgggcgagacggccgacgccgtctggaacccggccgatgtgaccgagccgctcgaccgcgccgtgatggcgaagctggcgctggtgatccgccaggccaccgacgcgctgaacgcctacgagcattccaaggcgctggaagtcatcgagagcttcttctggcagttctgcgacgactacatcgaactggtcaagaaccgcgcgtacggcactgccgacgcgcacggcaaggtgccgagcgacgcggccgtgaagtccgcgcgcacgacgctgggcctaggcctggacgccttcgcgcgcctgctggccccgtacctgccgttcgccaccgaagaggtgtggagctggatgcacaccggcgaggggtccgtgcaccgcgccgcctggccgaaggccgacatctatgccgcagcagccaccggtgcctccccggagacgctggcttgggccggcaaggccgtcgagcagctgcgcaagatcaagtccgaggccaaggtctcgatgaagaccccgatcctgtcggtgacgctggccgccgtcaaggacggcatcgacgccatcaagtccgctctggacgacgtggcgcaggccggccgcgtgatcggcaagttcgatctcgccgaaaagcacgccgaggaggccgcggccgaaggcgagggcgacgataccgtcgtcatcgatgccagcgagctcggtgagccgccggcgaagaaggccaagaagtaacctgcttctcactaacggaaacggccccctcggatccacgagggggccgttttgcatccacggcatcgtgacggcggcatgccggctgcgtgccgtgcgccgtatgccgcgcacccgtcacacagctggcatgatgatcagcagacgcagatcctcggtatgccggttccagtcggatagcacgtcgtaactgtgccgcccgtcggcgatgcagtggtcggagtatgcgttggcgccgtcgcacgacaaccgtctcaacgcggcagcgagacgcgcgaccggtttgccgtcgacggacgcactgccgctgccggccaacgattgcgcggcctgaaccagcatgtcggagacgtcaccaatcgccactgtctcgtcgatgagctcagacgacgtgctctgcaacggcgatctggggttcatgccggcgatgccgtataccggcgagaacttcggaaccgacgccgacttcgaaccggatgccgtgcccgccgccgaagacgagccactgccgctgacgttgccatccttatcgtcgccgctatccttgttgccgcccttgccgtcgctcttgacggcgccgccgagcatgcccaggccgctggcgttgcccatcacatcgccgatactcatgcctgactgcgagtcgtcatcggtcttgccactggccaacgcctgcgccttgcgctcggcctcctcacgctcctgcctgctgacggcggccagccgcttgcgctcggccttcgccgccatcgacgtcgtgtcggaaccggcccagccgtaacgcacccggtccgcagccgcatcgccgccttgcgcatcgccggtggaggcggtgctggtcagtgcgccggcgaactgtatgctgatctgttgcaatgcgttcgccgcgcccgtatgttcggatgccgccgccaaggcgtccatcgccgactgcactttctgattgtcgtcctgaaggtcggcgctggtggagaactcctcgttggcggcgtcaatcgcctgttgctgataccgcgcggctcccgccgacgtgcctccggtcagctcgctcagatgcttggtgtacacgtcggtgtaggccatcgaataggggatcatcgcgttggacagctggctctgcccggccttgtacgccgttgcgccctcggtggactcctgggccatggtctggctgatctcatcggcgagtcccgacgtgccgcgctgacggatgcgctgaatcaggtcgtctatggcatgtactgcgccgtcgtgctcatgcgcggcactgaccgcgttgaccgcgttggcgaggtcggtgaccgcctgcgccatcggggtgtcgccggtcagttcgccggctgtgccgatcagcgcctgcatctgcgtggatgagccgatgctgccggacagatgggtcgtgtacgaccccacgtaatgcgccatatacgacgagaacgcagccttgtgcgctgcggttttctccttgatcgccttctcgccgagcttctgctcgcgatcgcgcatggaggtcagctgttcgattagtttgcggtccgacgcggaaccggtgacgaccagcgtgttgaccagtgcgtcagcacggtcggagacagccgtgacctcgtcgacgaacgacgccgtgtcatcggcctgcacggtcacgaacgccagttggctcatcgagaagttcttcgcgttcatatagcagtcgaacaccgtgcgtttgccgggctccccgacgccgctgacaagcatgtcggatccttgcgtcgtcagcgtcatgccgtctccgacggtgatatcgtcggagacggaagacggtacggtgaacgccaccacgggaatgctgttctccgcgtagccgttggacacggccgcattgggctccacggtgatacggatatcgaccagtccgctggcaccggcgatctgggacggcttcacctgcgggccgttcaggccgtaggcgatgctgaccgaccacggcaacacgcgttgcccggccttcacccgctcctgtgtggtcttgccggtttccacagccttgtattccgccgcgagcatggaaccgtcaccgctgttgccggccacgtagtcgacgatgtcgccgccacgggagaccgtgaactggttggtgacgtacaggcgtcccggaaccccgtccgagttggcgagagacatgacattctgcgtcttggaatacccggcatctccttcggccagattggcaccggccatgaccggcccgcccgccgaaggggccagagtcagggccagcgtggcgacagccgccaggcttcgcgtcatcaccccggtcatatgcgccatcgtcgctccccctttcattcatcatcacgcggcccgcatgccgaatacaggcatgcatatgcacgccaccgacgatgcgggcagagcggcaaatctccgccgatcaggcgaacacgtcgagcacgccgggatcccctcccgcgtcggcgatgcgctgatgccgcttcttggcctcggccaccacgaattcccggtacatttccgcgatgtcgggatcgagtccggcgtcgatggcgatgcggtgcagccgttcgatctggtagtcctcgcgcttgtaatccgccggcgcgaatccggcccgcgccttgagtacgcccacctgggacgtgtacttgaaccgctccgcgagcaaggagacgatggccgtgtccacattgtcgatggactgcctgagcgccttgatcttggccacggtgaccgcggtctgcggatcatgccgtgcggtgtcggcgtcgatgacggtttcggatccgccgcctcccacctcgcgggatgacggcttcgcccaatcgctgttctcgggttcactcatactgcctaccatagcgcgtgggccgaacccagaccgtcggttattcctcaacgatggaacgatatggtcaatgccggccgggatgtctaacgcctacggcgaatggcatccgtcagaaatacgtctgcaggatcaccgtgctttcggtgctgaccggcaccgtccgatggatgcggttcagcagctcttccagtttgctgggtgacgacacgcgaaccaccagcatgaagctgggcgcgccggctatggagtagcaggacaccacgccttccagctcatgcagcttgccggggatatcggcctcctgcgagtagtccagcggcgtgacggacacgaacgcgctgatcggcagaccgcgcagctcatagtcgagcaccgcgcgataccccttgatgactcctcgcttctccagcttctgcacgcgggactgcaccgcggacaccgacaggccggacagccgggacagctgagccagcgtggcccgcccgtcctcctccaacgcatcgaggatggactcgtccgtggcgtcgagcatggcggagccctccggcctgatctccaccttgcgcgatgccgcgtccggttcctcgtcattgcgcgtattcgcctgtgccatcacgtcctcccgggtcatacggttcgccgcaacctgcatgtggagcggttccggcgcgaacttgtctgatgacagcttatcgcgatgtcaatccagtgttattccattgatttcttactgttatttacgaaatatatagtaataattactgtttttcaatgtactactgtatattttatattcttgttcatgattgaaaggtgacaccatgtccatgcccgcactttcgcagcactcgctcagcgtcccccgttccggcatccgggacgtattcgaccgggtcgagcacgtgcctgacgcaatctcgctgtgcgtgggcgaacccagcgccaccgcggcgccgcatatcgtggaagccgcatgccgatcgatccgcgaaggacacaccacatacacgaacgtgctcggcatcgagccgttccgcgaggccgtggcggcatactccgaaaaggtgaaggggctgcgctacgacgtcgacaccgagatacaggcggtcgacggcgcgaccatcggtctgttcctggcgatgaaggcgctgcttgacgccggcgacgaagtgatccttccgtcgccgtacttcacctcgtacgatgcggaggccctgatgtgcggcggagtgccggtgcccgtcgcgctcaaaccggaacaccagatgcggctgaacgccgacgatatcgaagcagcaatcacgccgcgcacgaaggctgttcttctcaactcccccggcaacccgtccggagccgtcacgccgctatccgagctggagcgcatcgccgacgtctgcatccggcatgacatctgggcgatctccgacgaggtgtatcacccgttcgtcttcgacggctccgcgtcaatcgcgccctccatcgccgccgtcgacggcatgcacgagcgcacggtcgtcgtcgaaagcctgtccaagaccttcgccatgaccggctggcgcatcggctacctgctcggccccgagccgctgattgaacagaccagcaagctcgccgagctgatgcactcatcggtcaactcgacggcgcaatatgccgccgtggccgcgttgaccggcccgcaggagcatgtcacggccatgcgcgaggaataccgcaccaagcggcagatcgtgctggacgagctcgacggctgcaccgcgctgcgcctgatcgagccgcagggcgcgttctacgcgttcgtggacgtgcgagcctgcggcatggattgcgacaggttcagccgtatgctgctggacgaggagcacgtcgccgtggtgccgggaacggccttcggcagtgagggggccggattcgtgaggctttcctacgccggggacgggcgtgagctgcgcgagggcgtgcgacggatgcgcgtgttcgccgaacgtcacgtcaaccccgcgctgggccgccatacgcccggataccatcatctgcagatcatggcctgaaagcaggccggatatagacgggagcccccgcttcaatgccgaagcgggggctcctctcgttcaggccgtctgccggatcagttgccgttgaccgggttgctgttgctctgctggataatggcggagaggaagtcgcggttcgtcgcggtcttcttcaggcgcggcaccagcgtctggtatgcctgctcgggctccatgccgccgagcagacggcgcagacgatagataatcggcagttcctgcggcgaggtgatgagctcttcgcggcgggtgccggaggcgttcacgtcgatggccgggaacaggcgcttgtcggccagctcgcggctcagacgcagttccatgttgccggtgcccttgaactcctcgaagatcacctcgtccatcttggagccggtctccaccagcgcggaggagatgatggtcagcgagccgccgttttcgatgttgcgggcggcgccgaagaacttcttcggcgggtagagcgcctgggcgtccacgccaccggacaggatgcggccggaggccggcgcggcgatgttgtaggcgcgggcgagacgggtcatcgagtcaagcaacaccaccacgtcctgaccgagctccacgagtcgcttggcgcgctcgatggcgagctcggcgacggtggtgtggtcggaggccgggcggtcgaaggtcgaggagatgacctcgccggccacggtgcgctccatgtcggtgacttcttcggggcgttcgtccaccagcacgaccatcaggtgcacttcggggttgttcgtggtgatcgcgttggcgatgttctgcagcgtgatcgtcttgccggccttcggcggggagacgatcaggccgcgctggcccttgccgatcggggaaacgatgtccatgatgcggccggtgagcttgttcggcgtggtctcctgcttgaggcgctcctgcgggtacagcggggtgagcttggcgaactgcgggcggttggccgcctcttcgacgctcatgccgttgatggtgtcgacggactgcagcggcacgaacttctggcgctggttgcggcggtcgccctcgcgcggcgcgcggatggatccggtcacggcgtcgcccttgcgcaggccgtacttcttgacctgacccatcgagatgtacacgtcgttcgggccgggcaggtagccggaagtgcgcacgaaggcgtaggagtcgagcacgtcgacgatgccggcgaccggcacgagatcgtcgccgccgttgtcctgatggtcggagatgcgcacttcgcgggtgtcgcgatcatcgtagtcgcggccgccacggtcgcggccgcgcatgcggcgctggcgacggtcgttgttgcggtcgttaccgcggtcgccacggtcattgcgatcgccgccgcggtcgccgcggtcggaacggtcagcgcggtcgctacggttgcggcgggtgaattcgcgctcgtcgtcatctcgattatcacggtcaccacgggtgccgcgggcggcgtccgcattggcgttctgcaccggaagcgtggcgagaatatcgtcgaggtcgcggacggtgtcgttctgctggtcgcgctcgcgcggttcgatggtacggcgacgacgacgcatcatgccggaatcagccgcatcatcgcgatgacgcggctgatcgtccgccggcgcgatgtcaagttcatcaaacagatcggcagccacctggcccgcctttgcatcgtcgcgggtgcgacggcgaggagccgcggcgcggtcgtccttgctgtcggattcggcggccttctggcgggagatacgcggcgtgcgggtcgaggctgcatcgggctcgggcagagacgcgaccagtccggccaccgcatcatccgccgctgacaccggtgcacttcccttgggctccgccttgggagcctgttccggagtctgcgcggcctgtgcagcgggctgcgtctgctgggtcggcttgcttgcggcgccctttaccggtcgcacggtaacgcccgccggcgcctcgccgcctgatcgtgcagcctgcagggtggcgaccaattccggcttgcgcatcgtcgacgtaccgcgcagacccatttgcttggcgagctccttgagctcgatcagcttcataccttcaagattctggctagttgccactcgtttgcctttccttagcagaccgtattgcaccggtccctgcactaagaatgattgcggtcttgccgctttgaacgtccgacgcactccatgcgtttcggactttccatactgtataacgggctggagaccaatgcaaaaacggacgccgagtcgcagacataaacaaatgcccccgctggcgggggcgatatctggtgtgggttacttttgttcgtggtaggacttatccgtgttcacggaccacacgttctgcttcgaggtcttgccggacttgatgttggcgacggcctcgatggcggtggccatggagtggtccatgttgttgtagcggtgctggccgttgcggccgacgcagtaaaggttgccgaaggagtcgaggtattcgacgagttcggacatctgggcataggtgtcgaagtaggcgggatacgcctttttgacacgttcgcgatgggagtcgaggacatcctgcgggccgttgatgacacgcatgcgggtcagttcggaaatggcgaacttggtggcctcggcgtcggtcatgttccagaaatcgtcaccctcgttgcagaagtattcgaggccgatccagacggtatcgtcgacatccttgacaaggtaggggctccagttgttgaagatctggagacgaccgaccttgtaaccgggatcctgcacgtagatccagcaatcgggcacgatgggcgggttgccgagcgtggggatgtcggtggtgttcttgaggcgcatgtgcttgacgagcagtccgacggtgacgaaatcacggtagggcaggccgttggcgatgtgggtcatgtcctgcgggacaggcgccgaagacgcttcggcgtcatcgtcatgagacgccgcatcgatggcgttgacgaggtccttgacgggcatggacgagatgaactggtcggcgtgcagttcggtgcgcttgccgtccgaggactcgtagaccacggattcgatacggccctgtgcctgacgaatctcgacgaccttggcatcggtgatgacggtggcaccggcgtcgacgcaccggcgttccacggtctcccagagctggccggggccgagcttggggtaccagaactcctcgatgagcgacgtttcgacctcacccttgcgcttcttggggctgagcttgcggaaggcgttcttgagaacgccgaggatgctgaggcccttgacgcgctgggcaccccaatcggcggagatctgcgagggatgacgcccccacagcttctcggtgtagccctcgaagaacatggagtagagcttgcggccgaaccggttgatgtagaagttctccagactggtctccggcagcttatggaacatggacttgaggtagctgaaacccgcgaccatggtgagcttgaagcccatcgccttgaaggtgttggcggacagggagatcgggtagtcgaagaaccggcggttccagtagatgcgggagacgcggtggcgcttgagcatcacctggtcggtggtttcggggtcgggaccgcccggctccatgtcgtgctcacgaccgagtttcttgtcgtcatagctgggggcgccctgcagcggcagcacgtccttccaccagtccatgatccggtcgtccttggagaagaagcggtgaccgccgatatccatgcggttgccgttgtgcttgacggtacgcgaaatgccgccgaactcctgcgtttcttcgagtacggtcacatcgtatgtgtcggagccgccgttgttgacgaactcccatgctgcggtcaggccagccgggccgccgccgatgatcaccacggattgcttctgcgtcacgtgaggtctccttatcgctgaatcagagacagtatatatgaaccgctggaaacgcacgccgattttgttgttttgcttacaaaaaccttccgtcgccatacacgagaagccgcgtatcgcaacgaaaacgagagcgggaaacggcgacgtgccggtttggggcgcacacggcaccggcaaatgacggcggacggccgaccgcagtcggcctgcaatcagccggtccgaccgtcagcgcctcaattcatatcgtcggggatgtcgatatcggatttctgcacttcctcgacattcacgtccttgaacgtgacgatgcgcacgttcttgacgaaacgcgacgaccggtacacatcccacacccatgcgtcggtgagctgcacgtcgaaatacacgtcctgaccggcggaacgcacgttgaaatcgaccttgttcgccagataaaaacgccgttcggtctccaccacgtaggtgaacagcttgatgacgtcgcgatactccttgtacagggtgagttccgcgtcggtttcgtaattgtcaagatcctcggcactcattcgtcatcctccatatcacgtttacggccacgtccgaggatacgccaccaagcttccttcgaaggtttgcgttcgctctgcccatacggccaagtgcttccctcacccggcgcggccaattcatcgtcattgtgcgcttccggcactcgggctgcggcgactttctcgattcggggcgcctgttcggcatccgcactctcctcgaccgcggcgggctccggcgcgggctcggcctgcgcggcgatgttcttcctgatggcgatcgagtgctcacgggcgctcatcgcctcctgcacaccgggattgtcctcaatcacgtgcatgccgaacgcgtcgagagagcggatgggatcatactcgtccaccagcgtgtccatgacaatcaaatcctggtatttgttgttctccgcatcccacagagcgtcgcgcgaggcgccggacggctcgaagccgagcgactggtagacggagcacgaacgcgagttctgctcgggcaccgccacccagatgcggtgcatgcccaggccggccggttcgggcgcgaaaccgtacgtcatgactcgcggcatcaggtcgcgcgagtagccgcgcccgcggtagtcacggcccagcaccacctggatgcgggcggagcgcgaccagccatcgatgtcgatcaggaaaatcatgccgatgacgttgtctgtcgactgcgcgtcgatttcgccgtcctcgtcatggtcggcgtcggtcagtaccgcccatgcgatggtgcggcgggactccggatcgcctacgcccgactcgtcgggcttctgcccgttcgcccacgccaccgagcgtctcacccacgtgtgtacgacggcgcgttccgcctgagcgtccttgccggtgatcttggaggcgccatagtaggcgtccagctcatccatgcgcggcaggtcgtcgacgctggccgggcgcaggtgcaccatctcccccttgatcggcggtatggtgatctgcgagggcagctcacgggatacgtcctgatcgagcggtaatgcggcattttcagacattcgttattcctcaactgacgctggtagaagtcggtacagaagatatcctacccgactgaccgtttgctgtgaaggagttgcccacgtgtctgccggctgtgggagcgcctgcggcatgacgaacggccctcgacacgcggttcagcaccgcggccaagggccgttcttcaaaccggaatttcagagtctcgggattccggcgaacccgcggggcgtcagcccttgatcttgcccatcacgaccttggtgacagccttcgcgtcggcctggccgcgcgtggccttcatcacggctccgatgatgacacccatcggcttcatattgccgctcttgagcttctcgacgacatccgggttggcctcgaacgccgcgtcgacggccgcctcgatggcgccgttgtcctcgacgatcttgtagtcgtgcttcctgacgacctcatccggggtgccttcgcccttgagcacgccttcgacggtctgcttggcgagcttgtcgttgagcttgccgtcggcgatgagcttctcgacctcggcgatgtcggccggggtgattggcagctcttcgagcgagacgcccttggcgttggcctcgcgactcagctcgcccagccaccacttgcgggcaccggcggccttggcgccggccttgacggtctcctcgatcaggtcgagcgcgtcggcgttgaggatgtcgcgcatctgcaggtcgctcaggccccattcggccttgagacggttgcggcgctcgcgcggcatctccggcatctgggccttcatctcctcgatgtgctccttggtgatgtggagcatgacgaggtcgggatccgggaagtagcggtagtcgtcggcgtcggacttgagacggccgccggcggtggtctgcgtggcctcatcccagtggcgggtctcctgcaggatctccttgccgtcgtccagacgcgccgcctgacggcggatctcgtactggatggttttctcgatgccacggaacgagttcacgttcttggtctccgaacgggtgccgtacggggcgtcggcggaggggcgcagcgagacgttcacgtcggcgcgcatattgccctgctccatgcgggcgtggctgatgttcagcgcacgcacgatgtcgcggatagcgcgcatgtaagcgccggcgatctccggagcgcggtcgcccgcaccctcgatcggcttggtgacgatctcgatcagcggcacgccggcacggttgtagtcgaccagcgaatggtcggcgccttcgatgcggccgtcggcaccgcccacgtgggtgttcttgccggcgtcgtcctcgatgtgggcgcgctcgatcggcacgcggaacacggtgccgtcctcaagctcgacatccaggtagccgttgccgttggtgggcttgtcgtactgcgagatctggtagtcgcgcggcatgtccgggtagaagtagttcttgcgggcgaactggctccactctgcgatctcgcagtgcagggccagacccagcttgatcgcgtagtcgaccgcggtcttgttgatgaccggcagggagccgggcagaccgagggagaccggggtcagctgcgtgttcggctcgccgccgaactcgatgtgggccgggcagaacagcttggtgttcgtggacagctccacgtgcgtttccagaccgaagaccacgtcgtatttcttggtggcatcggcgtacttcatcagtttttcagccatgatgtttgttttccttccgatgcgtcacttgttcaggccgtcgaaccacggggtcttcagggactgccagatcgggccgccccagctttcctcaagtgcggcttcgagcgcggcggcgggcttgtacatgacctcgtcgcgctgctgcggcgcgatgaactggaatccgacaggcaggccgtcgtcggacagaccggccggaatcgacatggccgggacaccggcgaggttcgccggaatcgtggcgatgtcattcatgtacatggccagcgggtcgttcatcttctcgccgaacttgaacgcggtggacgggctggtcggggagaccagcacgtcggccttctcgaaggcgttgtggaagtcctggatgatgagcgtgcgcaccttctgcgcggaaccgtaccaggcgtcgtagtagccggcggacagcgcgtaggtgccgaggatgatgcggcgcttgacctcgtcgccgaagccggtctcacgggtgtaggccatcatgttggcggcggtctgcggtacaccggtcggcggcatcacgcgcaggccgtagcgcatgccgtcgtagcgggccaggttggagctgacctcggacggcatgatgatgtagtacgcgcccagcgagtactcgaagtgcgggcaggagacctcgacgacctcggcgcccatctcttcgagcttcttgacggcctcgctgaagcgggcctcgacgccgggctggtagccgtcgccgccgagttccttgatcaggccgaccttgagtcccttaaggtcgcgcttgaggccctcgcgggccgcagcggccatcggacgcgggccttcgggaatcgacgtcgaatcacgcttgtcgtgaccgccgatgatctcctgcagcagcgcggagtcgagcacggtgcgggaaaccgggccgatctggtcgagcgaggaggccatggcgatggcgccgaaacggctcacgccgccgtaggtgggcttgacgcccacggtgccggtcagggcgccgggctggcggatcgagccaccggtgtcggtgccgagggcgatcggggcttcgaatgccgcgaccgcggaagcggagccaccaccggagccaccgggaacgcgctcggtgtcccacgggttgtgcgtggtctggtaggcggagtgctcggtcgaggagccctgcgcgaattcgtcgaggttggtcttgccgagcagcggcatgccggcggccttgagcttctcgatgacggtggcgtcgtacggcggcacccagccttcgaggatcttcgaggcggcggtggtctcgatgcccttggtgacgatcatatccttgatggcaatcggcacaccggccagttcgggcagcgcggccttgtcgtcggcgctcttggcgtcgaaggcgtcggcctggtcgagcgcctgatcggcggagaccttcaggaacgccttgatggacggttcggcggcgtcgatgacggcgaggtgggcctcgaccagttcgcggctggagacctcaccggccttgaccttggcggccatttcggccgcggacagcttgacgagttcagtggtgtcgctcatcgtcactcctcacttcccagaatgcgcggcgcgacgaacatgccggcttcggtcttcgggcctccggcaagcgcctcttcctgcgtcagcggcgtttcggcgacgtcggggcgcaggtacgcctccagcgggacggggttggcggtcggcggcacgtcatcgccggcgacctcctgcaccttgttgatggaatccgcgatgacgttcagctcaccctgcagacgggtgatctcctcatcggtgagcgcgatacgggcgagatcgcccaggtgctcgatttcttcacgtgtgaatgtaggcatggccttaactatatgagccgtatgtgacacgcaccattacattctcacgatgttgcgcggcgtccggcggccctgcggcagcggccatatcgcgcggctgtgcccgagcgcgcaacgatatggccgaatgagtgtcatttgatgtcggatttcttgaacaccagcaggccgatcaatggaatcctccactcgtcggcagccagcggcgtgacctcgtggccgaggaacaccagtctcgccacgccgagcgacggcacgggctgaggctgcgacgggatatgaggctgcgtcatcgcggcacctcctacgtgttcggctgagtgtaggttgcggcaggctcgccgtattgggccggcacctgccccggtatcgcgcgggtctcgtactgcgcctgcgcgtgggtgagcgcccgcgcagtcggctccaatgcggcaccttcaatgcggagcacccggccttgctgcgggtcgttggcattgcggggcacctcgcggacggtgacctgcggcgcggtttcgaacaccgcgtgcagtttgtcggattccggcgtcgcgacacggatcgaatgggtggaatgctctgcgacgaacgccgcgaccgtcgtggtctccagaatgcggccacgaccgatgacgacgagatcgtcagcggtcaatgcgacctcgctcatcaggtgcgagctcaacagcaccgcgcggccatgcccagcgagaatgctcctgcattgcgcttttccacgctcgcaaggccggtgaattcgatgacctcatcgacacgggatcgcggtatgccgttggtaagggcgaggccacgcagatgggtgtaggcggaccgacccttatgcgcggatttggcgtcgagaaccgctcctacggcggtcatcggcgatggtgtcttgacgaacggcactgcgtcaaccagcgcacggcccgcattgggggtgaccaggccgagggcggcccgcatcgtcgtggacttcccggcgccgttcgacccaaggaaaccggtcaccttgtcgtcttcggcggtgaaactggcattatcaagcacggtcttacgcccgaagcgttcggtaaggcctctatcgttatcatgattcgagcatacacacccgcgtcacccgtgctgcgcaatccagctgtgcatggccactgcggctgcggcgccggcgttgatggaccgcacggaaccgaattgcgagatgtataccacgtcatcagcgagttcgagagctttgttcgacaatccggggccttccgcgccaaacagcatcagacaccgttccggaaaacggtaggtttccatcggtacggcaccgggaatgatatccaatgcgatgatgcgggacgattccagcgtcctgatgcgagcgtcggcccgcgcgaccgcatcatagcccgaatgatccgttgcggacgcgaatcggggggatccgttggattcgtcatcgtccgagagaagcgcactcgcatcggagtgagcctgatgcgcgtgcatcgccgcggcggcggcctgtgcctgggcggcggcaatttctcccgcgatgcgcagcttccagcaggtgacgagttcgtcgatgctgggatgatactcaacgtgctggtacagctcggtcatcagcgagcccttgcggttccatttgtgcgggccaacgatgtgcacgcgatttgcggtgaacgcattcgccgtgcgcaccatggaaccgatgttgaaatcgtgcgtccagttttcgatggcgacttcgaagccgtggcgaccggccgcgtccagatcgtcgcgaatggcgttcacggtccagtaccggtaacggtcgagcacgttgcgacgatcgccttcatccagcagcgtcgtatcgtagcgtcgatcgtagttcggcgatttagggtcatccgggcgtggctcaccggggtgctcctgcgtccatggtcctacgccgacttcacgaaattccggctcccccgaagcctttgccgccagagagatggggttgggcttgtgcatggctatcgcagttcggattcgtggtagatttcgacgaatggcagctcctgccgttcaccgctcacggggttgacgacctcgatgacgggttcggtcatgtcgacgccgccgatcagcgatgcgatggcaaccactttcgcgccttcatgctccaccacgccgaaatcgaggctcagctcattgccgttgcgcagcgtcaccagcgacgaggtctgcacataggatttctccgagagccatgaatccagcaataccacgcgcttgcccttgatggacgggcctttgatggacgggtatacgaagtccatgacgaatccgtcgaggtcttcaccgcgcgatgccgccgcctgaatcatcgcgccgaccagtggaacggccgcggcggtcaacgcaccgacggcgtcgaaatcatcgatggaatagccgttctcctcaagcgtgtccagaagaatgtgaccgacgatagccgccccgcgatggtcgaaggtgacgccggcgagctcgcagaacggcttgccttccatttccgcggcaatcagccgtcggagctgttcgcgcggctccagcatggagaagtcatccgtctgactcggcgatgcgtcggaaggaatgttgttcttgcccacagcggttccggtcgtcccggtcttgcggaatccttgctcttcattcatggttctcaggatatcgttgcgtgccgtcaagtcaccgccggcaatggccatgcatatccgcgcggttgcgtatttgcctcgctggcgggggccgagtcatgctggtattcctttggatgctctagcgttggttttattcgggggtggtttccggggcggtgatttcacggacatcggatttgtccggatcgatgatgttcaccgacccgatgaccgtggcctgatcgagcttctgcagtttgcgcgcggtgaccagcacgcgggattccaacgatgacgcgaattggttgtacgccgtcacggtgcgggtgagcgcggtaccgagtttgttcgcgcgctcccccagtacggcgaaacgctcgtacagttccctcgacaggtcgaacagggtcttggcgtcatcggtgaggctctgctgctgccaagcgtatgcgacggatttcagcacggcccacagggtgaccggcgaggtcaatgcgaccttgcgggcgaaggcgtcatccatcaatgtcggatcggcctccattgcagcctgcagcaacgcctcgttgggaatgaacgcgatcacgaaatcaggggccgtgtcgcatgcactccaatacgccttatcacccaatgccctgacgtgttcacgcaaagctttcgcatgcgaccgcagcagctcgtcacgccgttccagatcctcaggccccgcggtttccggaatcatgcaggcccgctgataatcggcatacggcaccttcgcgtcgatgggaatcgtcttgcctcccggcagatggacgatcatgtcaggccggagcgtcttaccgtcgacgccagtcatcaccacctgcgtatcgaagtcgacgtgctccagcaaaccggcggactccacaatgttgcgcagttgcgcctctccccaagcgccgcggaccttgttgttgcgcaatgccgccgagagcgagctcgtctcacggtcgagcctcgcctgctgctcacccagccctttgagctgctcgcccagcacgcccatctcgtgtttgcgcccctcctcgatgttcgagaccttctgctgcagctcatcgagattcttctgcaaaggagccaacgccgacagcaccttgccctgctctgtcagcgctttttcctgctcttcccggcgccgcagcccatcggcctcggcccgctcgcgctcacgttgcacccgcacctgttccgcctgctgcgcctgagcaagctgggatttcgcgaacgacaattgctgcagaagtccctcggactgggccttggcctgagccacttgggcggcaagccgcgcattgtcgtccttcatggcctcgcaggatcccctcagcgcgtccacctcggaggccttcgccatgcgggcggaggcttggccacgcattttgcccagcgcgaatccggcggccagacccaacaacgccaccaccgcaacgatcaccacatcaagcacttcatcgaacatgtgtattattacacatcatcccgcggacgaacgagtgccgcacttatgagcgaactagtcgggaaatcaccttctcgacctccgacagtttctcgtcggccacctcgccgccctcggccgccgcctgccgcacgcaatggttcagatggtcgtcaaccagcatcaccgacacggccttcaatgccgaagtcgcggcggagatctgggtcagcacatcgatgcaatacacatcatcctccaccatctgcgcgaccgcatggacctgcccctcgacacgccgcagccgcgcgaggatcttcgccttgtctccgtcgtaaccctgcataaccaaccttccgcccagcgcgaacattcctgacaacacgcattatataccctctaggggtatagggtatagttaatatccgagattatgatagaaaggggaaaggagcggcgatggaattcaacatcttcctcggtgtggcggcactggtgatagccgccgtgctgacatggtgcatcctgcgattcttcttcgcgcccagaaggggaggcgcccgggcgacgctgcatgacggcgttcaacaggcgaccatcacggtcaggggtgggtactcccccgatatcgtcacgatgcaagccggcattccgatcacgctgaggttcgatcggaaggagaccggcgaatgcacgtcgcatgtcgtgttccccgatctcggaacggacacgatgctgccgggcaacgagaccaccgagatgtcgcttccgccgctgccggccggcgactacccctttgcatgcggcatgaacatggtgcatgggttgcttcgcgtcgagggggagacggactccgccacaaaaccggacgacggcactgcatcgaccgggaccgccataccggccggcacgcccaggatgtccgccgcggacgcgctgctggccgagcggcaggaggcggaggaacgccgtcaggagattcgccataccggcatgctggtggccatcggcaccgttctcacgctcccggtgttcgtccccatgatgctcatactcgtcagtcactcgctcgttccttcatggctgatgaacccttggctgcaggccatactcatcaccccggtcatgttctactgcggggcgccgatccaccgcgtcggatggtcggcactgtggcatcgttctccggatatgaactcgttggtggcattggggaccaccgccgcatacctgtacagcatcgccttgtgcttcgtctcggagctgatgcccgaggggtcgagagagccctacttcgagtcggtcggcgtagtgatcacgctcgttctggtcggacgcctgttggaggcgaaagcccgtgagggcaccggaaaggccgtgcaatcactgatcaagctgcgcccacgtgtcgcccacatcctcgatgtcggaacgccactggccaaggatctggccgccggcaaggcatccggcgacggatggctcgaccctgcccaatcccaagacatcgacatcgaccgcgtgaagaccggcgatctgctggtgatccgcgccggcgagcgcataccgctggacggcgtcgtgttggccggcgaggccagcgtcgacgagtccatgatcaccggcgaatccgttctggcccggcgtggcgtcggagagcccctgacgggggcgaccatcatgcagcagggcaatgtggtcatgaaggtcacacgcaccggcgaggacacggtgctctcccagatcatcgctctggtcgcacgcgcacaggcgaccaaagcgcccgtgcagcgtctggccgacaggatcgcccgcgtgttcgtccccgcggtgattatcgccgcattgtggaccggtgccatatggataacgttcgggccgcaacccaaactagcccatgcgctggtgacggcggtcagcgtattgatcatcgcgtgtccttgcgcgctcggactggccacgccgctatcggtgaccgcggcgaccggcctcggcgccacgaacggcgtgctggtcacatccgccagggccttggagcaggcccgcgacatccgaaccgtcgtgttcgacaagaccgggacgatcaccgtcggagccatcgatgacgacgccgactacgccaagccgagctatacgaaggacagcgtcaagccgggttccaaggaggcgatagcagcgcttcgagccgctggcatccgcacggtgatgctgtcgggagacaaggcggaggtcgccgaacgcgtcgccgcggaagtcggcatcgacacggtgatcgctcaggtcaggcccgacggcaaggcctactggataaggcagctgcagatatcgcgcgacgccgccgcggcacagtcgtcggtggcccccgccatcgccgacgtccccaatggactggtggccatggtgggcgacggcatcaacgacgcccccgccttggcacaggcagacgtgggcatagccatcggcaccggaaccgacatcgccatgcaatccgccgacgtgaccctcatgagcggcgacctgcgaggcgtggtgaaaaccctcaacctatcccaagccacgatgcgcaacatccgggagaatctcgcctgggccttcggctacaacatcatcggcatccccatcgccgccggcgtgctgtaccccttcaccggctggctgctcagcccgatgatcgcaggcctggcgatggcgctcagctccgtctgcctggtgctgaacgcgaaccgcatgcggcgcgtcacactgagccccgacaccgtctccttcaccgccgcaggcggaagagacaccgacaggagagcgcccgaccaacacggcgcgcgcagcatcattctcgacaccggagaccgtccccgtgccgatggccatcacaccgatgagggccatcaccatcagccgaacaaggagcaacccatgcacatgaaccacatgcattccgcagacatgaacgacgcgacgcagaccgcgaccgaccctgtgtgcggcatgaccgtcgccgtcaacaacgacgccatcacgcgcgagcacgacggcacgacctattacttctgcgggggacactgcgccaacaacttcatgaaggcaccgcagctgttcctggaaaactgaccggcccgtaaaacggtccggtctgaagaccgaccggaccgtggggcgcaaatcattccgtcgagtactaccggcgcttcgatctgcgtcccttgaagtagatgtcgaacacgatccatgcggagaggatgaacgctatcacatatcccatgaatcccacgaccggtatgccgaagatgatcggcttcatgcccgcgtagtacacgatcgacgatccgacgaacaggccgacgacgatcaacgccatcgtcaggcggttgaccatgtccgacagcaggcgcatcggttcctcggaaccaacgacctccatgttcatgcgcagctggcctcgggtgagcatgcgcatcgcgaccctggactcgctcgccgcggacagcaagccgtgcaatgcctgatgtccctcgacgcccagcgccttgatctcgtctttcgccgctcgatccaacgacttgctgccggcaatatggtcggagatgatctgaatcatgttcacgtcggggatgaattcatccagcaggccctccaacgtgaccaacgccctgccgaccgtcgtcaccgtgcccggcacctcgatgccgtgcctttgggctaacgacgtcagcgacgtcaggaacgccgctatgtccaggtcgcccaggtctaccgtgccgaactccttgacgaccatgtccaggtcggccagcagcgcggggtaatcctcaggattggactcggtgcccgcgaaacgcagcagaccgtccgccagcgcggcggaatcctgtttggcgacggcgaagatcatctcccggagcacgctgcgggcctggctgttgagccgcccggtcatgcccagatcgataagcacgatctggccaccggagatgatgatgttgccggggtgcggatccgcatggaagaaaccgtcgtccagcacctgcgtcgcatagttgtcgaccagcttggtgccgatttccttgaggtcatacccggcttcgatcagctgatcggtatgggagacggcgatgccctcgacgtaatccataacgaccacgtgctcggtgcacagatccatgtacggtttcgggcagtccatataccgataggcttcgcagaagcgcttgaactcgctgaggttacgcgcctccaccagaaaatccgtctcggattcgaacgtatcccacagttcctcgaccacgccgccaagatccaccacctgcgcactgggcagcatcttcgtggcagcccgggcgatcgaacgcatgatggacacatccaacgccatgatctcgcgcacgccaggccgctgcaccttcacggcgacgtcttcgccggtgaccagcgtggcgcgatgcacttgcgcgagggatgcggaaccgagcggcgtcggatcgatgcgggcgaacacctcgcctatggggcggccatattcctgcgtcaacgtgtcgacgacgatctgatacggcatcgggtcggcatcggcgcgcagcttcgcgagctcgtcgcagaacgactgcggcagaatctccgaccgcatggacagtatctgcccgaccttgacgaatgtggggcccagtgcctccagcatcagcctcatcttcaccggagtgaggccgtgcaccacatcgaactggttcgcaatgcgcatgatctgtccgaggcgcttgactttcccgcgcctcgtcaggtgatatcggctggagaaggtgtcgcgatgattgttgaacagcccgatggtgggagacccgtcccattcgcggcgtttgccggcacgtcgcgtcacgacaccgtctttcgccgaaccgtccgaccccgatgcggatttcccccgttccggatcatgccgtgggtcgccggcatggccgcccgcggtataggacggcatggtgcgctgctccggcatgctaagcagcggagccttccgccggggaaggatcttcggcggcggcaccggcatcgctctgctccttggcgccctcagtcttttcctcggccttctccttggcctcctgcgccttgtgcttgagctcggtgttcaacgccttgccctgttccacggtgagctcgcccttcttcaccagaccgtcgacgatctgctggctcttctcaaagctctgctgccccagctcaacgccggtggccaatgccccaacgcccgcgagaaacacccggcgcaggccttcacccaaatcgaaatcagccatgatacctcctttggttacttgtggttccaagattacccccacccgtcgcataacgcgataggggtggcgtggtttccgctatgagatggaaaccacgccccggcaatccgctcatcggcccatcaagctcatcgacccgtcaagcatcgcagagtccgagggcgcggaaccgtccaattcaccgggggcgggcggcggcgaccttgcgggccttgtccgccagagcgtccaaccgtgccagttcgaacatctgctcgctggactggtccggctcgaactccccgtaccgtctcgtcactgcggcccgaatcaggaaatccgcgaccgcggggttcttcggcagcagcgagccatgcatgtacgtgccgatgacattgccgacacgagcgccttccgtatgatcctcgccgttgttgccggtaccgtcatgatcgacatgccccagcggcaacgttccctcgcgcaggaacgtctgcccggaatggttctcatagccgatcacgtcgccgaattcgtcgctgtgctcgaccagattgccgatcatccggtggctctgccccaccgtgtacgcgccgagcacgttgatgccgtccaaccgctcgccttccgaggtctcgaagtattcgccgaacagctggaacaggccgcagatcatcagcatcggagtaccgtccgcggccaggtcgcgcagccggccggcccgcttgaacaggtcgccggtgattttcttctgcccggtgtcctgaccgccgccaccgaggatcatgtccacgcgctcgggccattcgtcgccctgattgtatgcgtgcaggcgcggctcatacccgtacagtgccagccggcgcagaaccaccagcacgttgccggaatccccgtagatgttcatgtccttcgggtagagggacatcacgtcgatcacttttcccatatccgttcgcctttcccgctcatgctgtcagtcgtcgcgccgctcatcgcccgacgccggcatcggcgacggtggtcagcttggcgagttcggcacgcacgcggagcatcgacgtgtacgtgcagtagatgtgtttgggcacaccgggacgggcggtgacgaactgccgcaccgccgcctccagatccgtgccggtctgctccaccctgacctgatcgtattcgagccgcaacgccatatcccaggctcgcgtacccgacaccatcgcgacgccagtcgggcgcaggctggtgaaatcgacatcccacagccagctcatgtcgcgcccgtccgcgtacaggtcgcagatggcaatcatcgtgtcatgcccgtcgggcggaaacgagccgagcgacagcctgaagcccatcgggttcttgacgagcagcagctgcacgtcgctgccgttgaccgcaatcgtttcgccgcggccgaacgcgggggtcacctcggcgagcgccgccagaagccggtcatggtctactgggctctcgtcagatatcgccgcgtctgacgcatgcgaggcctggccgggcatggtttcggcgacctgcgccgaagcaatatcctgcgccatgaccgcgcggacggtggcgagcgccgccgccgcgttgaacaggttgtacacgccttccagcttgacggcggtatggacggcccgcccgtcaatcaggaaatcggcctcatggttgccgacacgggtcagcgtgacatcggccgtcacctcgcgcccatcggcatcgggggcctcagccgaaaccgatgtgcctgccggctcctgctgcgcgcggtcatttgccgacggcctgccattgccgaccacgctcgcggcctcttcggcgacggtggtctgcatgtcgtcgtcggaggggaagaaccgacgcagttcgggcgccagcccgaaatagcgcactccggtgccttccggcacggccgaagcgaaacgcgcgattcgcggatcctcacggttgagcaccacggtgcccgtcgtcgcctcggcgacacgctccagcagacgcgcggtgttgtcgatctcgccgaaccggtcgagctgatcgcgcatcacgttgagcaacagcgcgaaccgcggtttcacctgctgcacgaatttcaccgcatacgcctcgtcaagctcaagcacggccacgtcggcgtccagcctgccgctcaacggcacttcggtcagcagcgccgagacgacgccgcgcgtgaagttggagccggtcggatttgtgaacaccttgagtcccagcgtctccagcatcgaggcgaccatgcgcgtcgtggtggtcttaccgttcgtgcccgacaccagcaccacgccatacggcaggtcggcgagcgtgcgggcgaggaaaccggggtcgatctgttcgacgatcttgccggggaacgcgctgccgccgtgccgcagcagccgagaggcgccgcgtacggctttgccgatcagcggcgtggcgaacgcggtccatggacgcgccgcatccgactgcccgcccagcgcctcgcgctgtgtttcacgcgatgtttcacgaggctgggatccgttttcctcacccatcgtcacactccttgatcgctgttgtagtcctgcggcatgtccttgaacttcgagtatgcgcccagaaacgccagatggaacgtctccgtcggaccgttacgatgcttcgccatgatgatatccgcctcgccgggccggtcctccttgtcgtagaaatccggtcgatgaaccagcaacaccacgtcggcgtcctgctcgatcgagccggattcgcgcaggtcggacagctgcggcttcttgtcgttgcgcatctcgggcccacggttcagctgggacaacgccacgaccggcacttccagctccttggcgagcagcttcagcgctcgcgagaactccgagacctcctgctgtcggctttccacctgcttgccggatgacatcagctgcaggtagtcgataacgacgagcttgaggtcgttggtctgcttgagacggcggcatttcgcacggatctccatcagcgacatgttcggcgaatcatcgatgaacagcggcgcgttctgcaacttgttccagaaattgttgagcgtgttccaccggtcggcggtgatgtcgtcggcgcggcgcatcgccgcgagcggaatgttggtctcggcggagatgatgcgctgcgcaagctccaccttgctcatctccagcgagaacacgatcgacgtcatattgtgatgcagcgcggccgcacgggcgaaatcgatgcccagcgtcgacttgcccatggcggggcgccctgccacgaccaccatctggccgggctgcaggccctgggtcacgtcgtcgatatcgcggaaacccgtcggcacgccggttttcagatcgccgttctgcagcttgtcgagctgttcgagcgcatcgtgcaccaccgggccgatggcctcgtagtcctgcttgacgcgtccggtactcatctcgtagacctcggcctgcgcgaggttcaccacgtcttcggcctgcgagccctccgccgagtagccgagctgcgcgatcttggtgccggccgcgatcacgttgcgcaatatcgcccgctgatgcacgatctcggcatagtacgtggcgtttgcggcggtcggcacgaacgcgacgagcgtgtgcagatagtcggcgccgcccaccttgtcgaggtttccgtccttcatcagctggttggcgacgatcaccacatcgacgttctgcgagttcgagaacaggtcgatgatcgcctcgtatatcgtctggtgcttcggctggtagaagtcggtgacgtcgatcatctggctgacctcgccgatggcgtccttgctcagcagcatgccgccgagcaccgccatctccgcctcgtcgtcgtgcggaggcacgcggtcgaacacggcgtcgcgccccggcaaccccgcgtcgccctgcacatacgagccacctgattgcgggcgcggccctccccaattcgtttcttctgctgccataagacttgagtatatatcggagcttttccggtggaagatatctggcgaaaaatgcacagggccatctctcggacggcatgtcgcggtaagcggacgcgacattcgtcaccgtcacgcacggcttgctcgcaagtcatattcagccggcgtttacctgcgcgacacgcacgggtgacgtcatgtggacaaaaaagttgagttatccacatttaggggataactctggggataacatatgcagttatccacatcagggggataactctgtgcataacatggggataagtccataaacacccccactcgatttgccaaacacgtcgtcatgcgatataaacggcgccccattcggatcaccgccgcgctttcagctcttcgatgccgcatacgcgcccgcccatatgagctacagtgtgcatgtgcacacccctgacccacaatcatccgatcccgcgaccgccggcacggcccgcaccggtaaccgagccgcatacggccgcatactcgcgctggccctccccacattcggccagctcatcgccgagccgaccttcgtgctcatcgacacggccatcgtcgggcacatcggcgtctccgccctggccggactgtcaatcggatcgaccatcatcctcaccgcggtgggactgtgcatcttcctcgcctactccaccaccgcgcaggtggctcacctgcttggtgcgggccgccgccgagaggggctgcaggccggcatagacggactatggctggctctcggcatcggcatcgtgctggcggcggctctgttcgcaggggcccggccgctgtgcgtggcgctcaggggcacgggcgagacgctcgaccaggcggtggcgtacacgcagacggtggtactcggcgcccctggcatgctgctcgtgtacgcggcgaacggcattttccgcggtttgcagaaggtacgcatcacgttggtggccgcggtgtgcggcgccgtgctcaacaccatgctggatgtgctgttcgtgttcggattcggctggggcatcgccggatcgggcgcggcgacgatgatcgcacaatggttcatgggactgttcctgacggttccggcagtgctatgggcgaaggccgacggcgctgcgctgcgaccacgcctgtcgggcatcgccgccgccggaggggatggcctgccgctattcatccgcacactcgccattcgcgccgcgatggtgatgacggtcgcctcggcggcccgattgggaacgacagtgctggcggggttccaggcggtgaactcgtcttggaatttcgcgatgaatatgctggattcggtaggcatcgccggtcagaccctggtgggcgcggcgatgggcgcaggagaccgcgcacgcacactgcgactgacccgggccacgggacgagccggattggcggccggagccgctatcggctgtggattcgccgtggccggcctgttcatcggccgcctgttctcgcccaacccgcacgtccagttgctggtcgccgccggcatggtgacgatgggtgcgttcctgccactacaggggtggatgatggcgctggacggcatactgatcggcgcccgcgatttccgctacctggcgattacctgcacactgaccgcaacggtgtatatcgcattgaccgcgatctgcgtggatgcggccgcgcccatgctgcccggcgacctggccccgaccgtgctgttgtgggcgatgttcaatatcgtgctcatgggcggacgcggtctgttcaacggcctgcgcatacgcagcgaatcatggctcggtcagaccgccctctagcgaccggcccgcgacagccctcgctgcgctgcggaacacccaccttgacatcgcctttgcctcagctgagcatcatatgataatggcatcggctcccgaagatgggagacgccacgcggaaggagattccgccccgaatcagatgacatccgaatactcacagataagcaaagcatgatcgacgtgcgggagaaggccgctaggcagttcagcgcgcgcctgaccggtcgcgggttcgaaatctgggtgcgagagggcaacgacacctatgtggtcggcggtcaggaatacatgccgcaggacctggtcgtggtacgcgccctcgacgcggcaggcaatcccgtgtcagccgaagtcaacgtcgacatagccaccttcaacctgtacccggatactctcacgggcggcgctgtacatggcacgcaccagactttcgcgccaatggctccacccgtatcgcttggatatctcctcaccggccgtagccccgagcgacgacccgtcggcgcgggtcaggtcatacagcatgtccagcagcatcggatcacggtccacgcaacgggcgagcgactcccccacggccggatcgttcgggttcttgccggtcgcgaactcagagagcgtcagatgctcccgcaccaggatgcgcacccatcgcgcgatgtccgcgtcgaatcccatgcgcttcatgatcaccgcggcgtgacgggcgccctctgccgcatgatcggtcacgaacggacgtttgccgacatcatgcagcaggccggccaatagcagcgccgtgtagtgacggtcgtcataccgctcgcctcgcgccgccgaaacccgcgcgagccgtgacgtcacctcgacgctgtgccggtcgatggtataccggtgcgctgcagacgcgctcgggcgattgcgtatgcccagccattcaggcatccatcgaccgggtatatccacgaaatccagttcctcccacacgcgcatgagcgccggcccggaggccagcagacgcacgaacagttggcgcgactcatcatcccacacggaatcgcggatcgggcagcgccgcaggttctgcaaggtgaccgggctgatcggcagctcgaactcggcagccgccgcggccacgcgcaacggcagataccggtccgactccggttccacgcccggagccagcacgatttcctgctcgtgcttggccacgccgggcgcgacctgttcgaacttcggggcctctcgcctgcctccaccgcgcggcgacagcatctggaagaacgagaaacgcgggcgctcatgcgtcagcgaatgctcggcacgcgacgccgtggaatccagcgcgaacgcgatctgtcggcctatgcgggcgagccgggtctgcaagtcctcgatggaacgcgcctcccgctcccccggcggcagtgtcgggtcggcaagaccccgcatcgccgccacctgcgcctgatatggggcgagcagccgattcgcgtccttgccggcagccagatgaatgcaatcgcgcacgtccagcaacgcctcgacctcgtcgtcataccggccgtgcggtcggtcggcaagccatgacacagtcaacgcggagaccagcaccgaatcgcgcagaccgcctcgcgcctccttgatgtcgggctggttcaggtaggcgagtcgtccgaactcgtccagtcgcttgcgcgccgaattcagcagttccggcagccgcttgcgggccgctcgacgccagcgttccagaatcgacgtggccgtcgccgaaatcagcgccatatcgccggcgatcggcttgacatccagccagcccatagcggccggcagatcggaatcggtcacggcctcgcactgctgccgcgtgcgcaccgactgatcgaggtcaaggccgctgtcccacaggggataccacagtttgttggccagctcattaagctgttggtcgttgatcgtatgtggctcatagatgatgaccagatccaggtcggagctcgggccaatctgcccccgtgcgagcgacccgaccgcgccgaatccgatgccggtggacggcacgtcgaacggcaccgcggccaccgcgtcactccacaggcggcgcaggcaatccatggcgagctccgttcgcgcccggcgcttcgcggagccaccccggtacacgccgtcagcatccggctggctcatgtccatgaaccgttgcttgagataatcgaccgccgaactcaagacacaccaccttcaccaaattccgccccgcaggcgggggctgtcggtggagccgactggaggtggtcaaacccacccgggtgcacaagaccaccctcagtctcgctacgcgagccagctcccgccagcgggagcaatttcaatccttgccctccgccaccggaggcaaggatgtcgatatataaaagagtccccgcatggtcaggtgacggcgtgcggggacttgtcttaccgataacccgcgtccggcggaaagcgccgaaccacgggccgctttcagatcgcggcggagccggtctcgccggtacgcacgcgggtcacggaatcgagcggggcgacccacaccttgccgtcgccgatcgtgccggaaccggcagacttgacgatcacgccgaccagggtctccgcgtccgcgtcatcggacagcacctcgacgcgaatcttcggaatcagatcgaccgtgtattccgccccgcggtacacctcggtgtggccacgctggcggccgtaaccgttggcttccgagaccgtcaggccatgcacgcccgcagcggcgagcgcctccttgacgtcatcgagcttatggggctgaatgatggcagtgatgagcttcatctcacctcacctccttgagaaccgagctggcagtaccagcaaaatcataggcacgttcgccctgatcggccagatcgatgccgccgacctcctgggcttcggtcacacgccagccgatggtcttctccagcgcgaacgcgataatcgcggtcaccacgccggagtacagcatcgcgcacagggcgatgatgacctgcacggccagctggcgccagtcgccgccggcgagcagaccagtgccctcgccgaagaagccgatgagcacggtaccggtcaaaccgccgacaccatgcacgcccaccacgtcgagcgaatcgtcatagccgagcttgaacttcaggccgcatgcgaagcagcacagaacgccggcgatcgcgccgatgaccatggcccacaacggtgacaccacatcggccgcgggggtgatggcaaccagaccggcgacgatacccgaggccgcgccgatagccgtgtaatgaccggtgcggatcttctcagtgaagccccaggcgagcatggcagccgcggtcgccgcggtcgtgctcatccacgcatagccagcggtgccattggccgcgaacgccgagccggcgttgaagccgaaccagccgaaccacagcaggaacgcgcccagcatgacgaacggcacgttgtgcgggcgaatcggctgcgtgccgaaacccttgcgcttgccgatgatcagcacgatgataagggccgccattgcggcgttgatgtgaacgaccgtgcctcctgcgaaatcatgcgccgcggcgccgatcgcggtggagatcgggccctttgcgctcagaaggccgttattccacaccatgtgcgccatcggcgcgtagtcgaacgtgacccacagcgccacgaacagcatccacgtgctgtacttcacgcgctcggcgatcgcgccgcagatcagcgccacggtgatcatcgcgaacgtgacctggaacgacacgtccacgctgctcgggtacttgttgccgttcgcggcaagaccggcggccgtgtactgacgggtgccggcgtcgaacaccatcgtgtccttcagcaggaacccggtcgcagggtcaccgaaaatgccgccgatgctgctgccggcgtatgcgatcgaccagccccacagcgtccatacgaccgcggtgaccgacagggccgccgccgacagcatcagcatgttcagcacggctttggcgcgcaccataccgccatagaagaacgccacgccaggcgtcatgaggaaaaccaaggctgcggatgtgagcatccatgcggtattaccggagtccatcgttaccttcctctcttgttcgttcccgccgccgcgcatcttgaccgcgcgggaagcgggtcgttaccacttcatctgacatcccctgatagggggaatcaacacaacgatatgcaacgctcgctgagttttcaacacgttacggcacgttacgctcatgtaaagcgcgatgacgcgggtcttggctttcggccggattccggcgcaggcaacggttccggaatgcaaaagccggctgtccacgttgtggactgccggcttgcagggttcatgtccgacggtttgcgaacaacctcacgcgagaatgccgtcgacgaatccttccgggtcgaagggcgcgagatcgtccggtccttcgccgaggccgacgagcttgaccggcacgccgagctccttctgcacggagatgacaatgccgcccttggcggagccgtcgagcttggagagcacgacgccggtgaggccgatcgcctcggcgaacaccttcgcctgcgccatgccgttctggccggtggtggcgtcgagcacgagcagcacttcgtcgacgggcaggttcttttcggtgacacggcgaatcttgccgagctcgtccatcaggttcgacttgttctgcaggcggccggcggtgtcgatgatgagcacgtcggcgtcgtcctccttggcgcgggccgccgcctcgaacgcgaccgatgccgggtcggcgccgtccttgtcgctgcgcacgacgggcacgttgacgcgggcgccccaggtttcgagctggtcggctgcggcggcacggaacgtatcggccgcgcccatgacgaccttcttgtcttcggagacgaacagacgggccagtttgccggccgtggtggtcttgccggtgccgttgacaccgaccatgatgatgacgccgggcttgtgcgcgtccggcttgtcgacgttcagacggcggtcggtgtcgcggccgaccaggtcgagcaggttgtcgcgcagcgtggcgcgcacctcgtcggggcttgccttgccggtgatgcgcgcatcgcggcgcaattcgccgactagctgctcgcttgcttcggcaccgacatcggccagcagcagcgtgtcctcgacgtcctcccaatcggattcggagaggttgtctttggtgaggatgttgaacaacgccttgccgaacggattcgaggacttggaaagtttcgccttgagccgctgaatgcgcgagccggatttttccggtacatcatatgcgggagccgccggcttgaccggggcggcctgcgtcggttcgaccggcttacgctcttcctcacttcgaggggaggcggcttcgccctcggtttcgggagcagagagctgcctgtcaactgttgcggcgaccgtctcggattcttcacccgcacgacccgcctgacgcggcgatgttgcggtttccgccggccggccgacgacttcgttcttacgcgacctgccgcgtactacgccccacacaatgagcaggacgacaatcaccactgcggcgacaatgccgataatcagattcgtatccatggctccagcctaaaaaccgcaacggacagcggccggaataccacatacgtcgcattgttgcagccaagtcgacgactaattgggctgctggcacagacgctgcccctgagtcgtccctacatatcgaaccggggaagacgctggtataggcaaatctgccaccaatgcataaagcggcataccagacggcaccggattgccagcggtcccatgatattcaacatagaacaagtcgggcaatggtgccccaccctcatcgtggtaatactcgcgaccgccaccgaaaacacgtatcaaacaggacacgcacgacacgatgtcatggttgtcgaactcgctcgccgtcatcgacggggccacatacgtcttcatgatcgactctcctcagccgcacgacctaccgcgaaaacgtagaccccgacaacatttcgggggggtataggcgctaggcaccgcgaccactacactggagctcatggccaatactgcaagaatgacggcgctgcaacgccgcgaacagctcatccgcgtggggcgagcgttgttcgcatccaaggggttcgaggcggtgagtgtcgaggagatcgccgcgaacgcgaaggtcagcaagccgatcgtctacgagcatttcggcggcaaggagggactgtacgcggtaatcgtcgaccgtgagatgcgcgagctgaccaatgcgctcatcgaggcgctgtccgacaccaaggcgcatccccgccagatcgtggagcgcgcggcactcgccctgctcacctatattgaggagaactccgaaggcttccaagtgctcgtgcgcgactcgccgaccaccgacccggccggatcgttcaactcgctgctgggcgacatcagcctgcgcgtggaggatctgctcaccgccgcgttcaaacgccggaagctctccgccaagggcgtgccatactatgcgcagatgctggtcggcatgaccgtattcaccggtcaatattgggcggaccggccgaaggtcaacaaggagcagctcgccgcatacgtcgtcgacctcgcatggcacggcctgagccggctggattccaagccgatcctgcggttcgagagccagaaggcgaagcagctcgcagccaaggaagacaaagaacgtcgagacaaagagcggagcgagacaacggccccggacgagccggacgctcctgtcgagaccgccgaaccggacgaaccggcatacctgcccgcgagcgccgactgatcatcagaaccgcgcacaagccggaagcccaaaaaacggcggaacggacgacgggacttgcctgaacgccgcttagtgatagctttgcttgtagaggttagactcgctgcaacatccgaggcgacgtgtcgcacgtcatccccgcgacacctgtataacgaggaactatggaacaatcgtcgaaaacactcaccttcgtggtgcccgcctacaacatggaaacgtatctggagcgctgcgtggagtcgctgctctccgcgacggacaacagcgacatcgaagtgttgatcgtcgatgacggatcctcggacagcaccccggaacttgccgacatgtacgagcggcgctggcccggcaacgtgcgggcaatccaccaggtcaacaagggccacggcggcgcggtcaacaccggcatcgccaacgcgaccggcatgtatgtcaaggtcgtggacgccgacgactgggtggacatgccctccatcgacacgctcatgggcacgctgcgggtgcagcgcgtcgccacggatccggtcgacatgatcgtcaccaattacgtgtacgacaaggtgggcaagcgcgtcaagcacacagtgaacttccgtcatgcgatggcgaccaacaccgtgctcggctgggacgatctcggctgcttcggcgtcgccgaatacatactgatgcacgcgctgatctaccgcacccaggtggtgcgcgactccggcatgcagctgcccgagcacacgttctacgtcgatttcatctacgcataccagccgttcccgtgggtcaaatcgatgctgtacatggacatcccgttctaccactacttcatcgggcgcgaggggcagagcgtacagaccgacgtgatgatccgccgcgtcgcgcagctgcggctcgtcaaccagcgcatggtggaggccactcccgaaccgggaaccgtgccggacggcctataccgttatatgattcatttcctcgcgatcgaaagctcggtcacgtcggtgttcctgatcctgtcgaaagacaaggcaaactaccgtctcaaggacgaactgtgggcggacatcgacaaggcgtcgccggccatcgggcgtgacgtgcggcgcaagctggtgtcgcgcgcgctgaacctgcgtgggtctgtcgggcgctgggtgatccgacgcggctatgtcgtcgcagagaaggtcgtcggcttcaactgacgtgccgcgcggcggggctgccagctgatattcgcccctctatcaccgatcaggagaacgtccatgatgcaattcaccatgtccggaaccatgctgcgcttcgatgagacgacgctgcggttctcattcagccgcgacggtgcgacctggagcggctgcgacggcatagagccgcagctgacgcgcgaggatcgttcattctcgttcgccggcgccgctaccgtcacgcatgagcggatcgagaccggcaccggagtcggcgtgcgcagcgtgttcgccgggttcgcgggtgcggattacgcttttgagacgtatatctggatcgagcggtcgagcggcgacgtgctatgcgaatgggtgccactgcgcgagtgtggggccgagccgcgcatcgacagagtgctttggcctgctccgctgtccttcgaccatgcggacgcgcatgacgtgacgctcatcacccacgagcagggcgtgatgataccgaataactggcctaccgaggtcggcactgatgcggtctccttcggcgggcggttcgagactgcgggcgggtacatgccctggttcgcgcagttgcgcagcgacgggcatgcgtacatcgccatctgcgagacgccgtggaacgcaggatatgacatcgaccatccggccggcggaccgtacacgcacgtcggaatgtggttcgagccaagtctcggccgcatggattaccgtcgtgtcgtgcgatatcgtctcctcgaccacgccgaccataccgccgtctgcaagacgtaccgcgcttacgtcaacgaacgcggccggctgcgcacgctggcggagaaggcggcgcgcaacccgtcagtgcgtgacctgctcggccgttcatgggtgcatgtcggcatcaagacgaaggttcagccggactcgtcgttctatgatcccgcgcagcccggcaagaatgattcgctcgtcacgttcgcgcagcgcgaacggcagatgcgcacgctgcacgaaatgggtgccgggcggctgtacctgcatctggacggctgggcgcagcccggctacgacaacggccatcccgactatctgcccgcatgccgcgaggccggcggctggaagggcatgaaatcgctggtcgacgcctgtcatgagcagggagatctgttcggcacgcatgaccaatatcgcgactattacttcgccgcgcgcacgttcgacccgcgcaatgcgatccggctggcggacggcacgatgcccgagcacgcgatgtgggccggcgggcgtcaaacgtacctgtgcgccgagcttgcgccggattacgtgcgccgcaacttcagtgagatcgccacgcacggcatcgcgctggactgcgcgtatctggacgtgttcacctgcaatgaaggcgacgaatgctcgcatcccgagcaccgcatgacccgccgcgaatgctacgagcgccgcgccgaatgcttcgaatacctgctggcgcacggcattctcacctcgtccgaggaggtgtccgactgggcggtgccgagcctggtgttctgccattacgcgccgtacgacttccagatgcgctcccccgacgcgcctcggcacggcatcccggtgccgttgtacaacctcgtctaccatgactgcgtgatccagccgtggatgatggatcgggtggccggtggcgacgactacatgctgtacgcgctgctcaacggcggtgcgccgtacctgatccgtgacgccgcatatgccggcatggacggtgatatgaatgccgcactgcgcgcccgtaccgagaatgacatcgagcggtgtgcggtcgtagccgggctgcaccggcgcgtcggcatgcaggagctcgtgcggcatgaccttgtcggcggcgacccgctggtgcagcgctcggtcttcgccgacggcaccgccgtgacgtgtgatttccacgcgcagacgtatgaggtagcagcgaacggttctcattaagaaaggtgcgaggattccgcacattttcgaacaagcgaacattgcgtagaaagcccggaattccgggctttctgctgttttcatgttcgttttccccgtcacacggactcgcacctttcttattgagaaccgttcgctgcgacaagggagcaagccctcagacccacctatcggacatggcgaacgagttgcgcatcaggttgctcgacgtatacagcacgttatcgagcagcttatgggtcagatcccgcagacgcccggccatcgtctcgttcgcagccatgagcgccgcgcggatgtccccggcttcggcatcgacgagcgccgcatccgtttcttcgacaagccggcgcccgaacgcccgcacctgctcgccatagtattcgatcgcgttgcgcgtctcgtaccagtgcgcgtcggcaattacggcgatcagacggttcgtccagtacaggttgtcggtggagacctcgggcgtggtgtcgcgcagatacgccggagtgtcgtccacgttcgcataaaaaggtgcgaccgccgtgaacgggccggaaccgaaggcgatccacatcaccgccgccgctgcggccggcacgtcgtgccgcagttcgatcgcgaccatgtgaccagtgcggttgatgccgatcggacggtagcgatgccggctttccggtgtaccaagcgttccgtacgggtcaaaaggcgtgccttcgaaatgcgacgacatcagaaagtcgatgtcctcgaccgtcaccttgttctccggcgcccggcaccacgggatgtcgtcggaggtcggcgtgtagcgggccgcgggcgaatcccaatcctcgctcgggttcaggtgacgttgcatgtaccaggcgcgcggcgtgttgtagatatggtccttgacggtgctggtgccgaacaccacacgcgggttgatgtggtccggcagcacggcggcgacgccgaaaccggcgccctgcgcgggccgcatggcacggcccagatggtgccgatcgatgaattcgcgcaggtccgcgctgcacatgaagaaccgccgctcgccgaacgcgtcggagaagtcgaagtcgtcgatgcccagctggttggggatcgtcgcatagcagtcgtcgggcacacggcgcgcaatccagtggtgcccaccgattgtctcgacataccagatctcgtccacgtcggaaatgatcacgccgttcgactcataggtgccgtaccgttccagcagctcgccgagccgttccacaccctcgcgggccgaagagacatacggcagcaccagcgtgatgatgtcctcctcaccgatgccgccgggggtctccggccgatagccggcctctcccggcacgccttcggctggcctgagctcgaccagcgggtcggcggcgagcacgcgctcgttcaccgcgatggtttcggtggcgctcatcgccacgttgcgctcgcttgcgccggcctcggcgagcacgcctcggttcggcagcacgttcggcgcgatggtgtagcggcacggggcatccggcaggtcgatctcgacatggctgagcgtgctgcggtagtggcgcggctggtccgtcggcgccacggccacgagccgcttgggatcgtagcggccggagccggaatcatcgttgcgggcgatgatcgtcgcgccgctgcagctggctgattttccgataagcaatgtggtgcatgacatgccgaccactgtaggagccggcctcaccattgcgcatcaacgggacggctgcggcagaaaaaatactgcggaaggccaaatattatgtcatctcagccaaatacgcagggtttcacacgattttttcaggtaaaccacatgacttgccccgaaacatgcgtttatatagtaatcacgaccgcaaggccgcaataactgaaccccttcttctcttctctctcaagcccggcttccccgccgggctttctctttttccgcgcccctccatcgcggtgtcgcacttcaccaaaacacgggttgaaatagccgttcttgataattccccgtgtcaaatcgccgttttcgggccacaaaacggcgatttgacacggggaattgcggatttcggctatttcaacccgtattgtggcgccccggcccacgcatctaggcaaggcatcgcaatcggcgcagtttgtctggcgcgcccgcccgaccgcacaggcgggaagccccgccgaggccggcaccgcacgccagagccgctccggcaagctgacatccccgatctgatcaacatcggcgggggcttcgggcgccgcgtcggcctccggctctggcgccgacgcctggatacatgtcgtcgggctgttttccgtggggcttcgcatgatgatgccctgtttcatcaccggcgcctacgcgttctccaccacgcgcgtcagcgaattcgtgtgcgtgctgcgtcgtatgcgcgtgcccgaatcggcggccatcccctgcgtggtggtcatccggttctttccgacaatcgggcgggactaccggcgaacccgcgacgcgatggcccttcgcggtcttgcctccggccgactcgcgctgctgcggcatccggcccagtcgctggagttcgtgctggttccgctgttgatgaacgcgacgatcgtctcgcgtgacctgtcggtcgcggcacttaccaagggattgggacggttcggccggcatacctgcataacggagattcacagcgttggtttgattgggcggcgatggcggtctgcacgatcccgctggcactgagcatcggcggtgtactatgagcgatgtgatcatacggttgcgcgattgctcgttccgataccgtcaggccgatgcggattcggaggatggcacctcgccacggggcgccgcggcaggagagcgccggcgtcgaaacggcggccgacgaggccaacggattcatcatcgactggctggtgggaccggatcgttcactgggccgctaccggtatcggcttgaccggaccatcgccaaggggttggagggcaaaccctgttatgtgtttcatgcgacggacgcgccggcaggctgcccgttcagtgtgctggtggcgatggatccgatgcccgaacgggctgcgctggcgagcggcggcctgctcagtcatctgcattttcagtacgccagcgatgacggaatgctgttgagggcggagtccacattgcgcaaacgcatgtggtacccgacgatgtgcgccgacgaaggcacgctgcgcgaccaatgcgacatcgtgcgggccctgcacaagttgcctccgctcgaccgcgaggcataggctcatcgccggcatgatcgcccgtcgatgagccttgacgtgtcacgcgaactggctgttgtacagtgcggcgtaacggccgccgcgttccaacagttcatgatggttgccgtgctcgatgatgtcaccatgttccatatacagaatcaggtccgcgtcacggatcgtcgacagccggtgcgcgatgacgaagctggtgcgtcctgccatcagtcttgtcatggctttgccgatttccgcctcggtccgggtatcgacggagctggtagcctcgtcgagtatcaggatcggcgggtccgcaaggaagacgcgggcgatggtgagcagctggcgttgcccgaccgacaggttcccggcctcgttgtcgagtacggtatcgtagccgtgcggcagcgtgcgtatgaagtagtcggcgcgcacggctttggccgccgcgatgatctcctcgcgggtcgcatcgggccgcccgtaggcgagattctccgccacggtgccgccgaacagccacgtatcctgcagcaccatgccgaattcgcggcgcagatcgcctcgcgtcatggcggctgtggatacgccgtcaagcgttatcgcgccgccatcgatctcgtagaatcgcatcagcaggttgatcagcgtggtcttgcccgcgccggttgacccgacgattgcgaccttctgccctggctcggccacgaagttgacgtctttcatcagcggccgttgcggatcgtatccgaacctcacgtggttgaacaccacacggccctgcacaggctcctcagcgatcttcgccgcgtcagctggctgggggtcgggccgttcctcttcctcgtccaacagctcgaaggtgcgttcggcggacgcgagcgcggactgcagcgagttgatcatgtagctggcttcggtcagcggttcggacacctggttgatgtattggtagaacgcctgcgccacgccgacggtcatgcggccgccaagtaccatccaaccggcgagcagcatcaccgccatctgcgagaaccgcgcgatcatgcggatcagaggattgacggatatcgtgatgaagtcggcgagctgcgcggcttttcgggtgcgttcggcggcgtcctccatcactgccgcactgtcttcctcgcgattgtatgccttgatgatgttgcggcccttgtagtattcctcggccaggccggtcagctctccgatggtctcctgacgcaatgacgcgatctcgaggttcttgcgggcgaccagtttggttacccacatgctcaatgccatgaacacgaggaacacgaccgtgagcagccacgagtagtagaccatgatgaccagcgagccggtcaccgtggtgatggcagtgatgagtcgcagcaaccccgtctgcatgacttcgctgatacggtcaagatcgttggtgaccttgctcagcacttctcccggcttattgcggtcgaagaagcgcagcggaagccgctggatcttcgcgctgatctgcttgcgcagcgtcaggttgaggttttcggccacggacgccatcagataggactgcaggtagtagaagccccactcgccgagatacaggattgccagaatcaggatcgtccagccgataccgccggcgttccagcttactgagaacggaacgccgtcacgccatgcgccctgcacggcatcccatatcgagtccaccacgacggcgctgtacatcggagcggcgatatggaaaaacgtgaacagcagaatcgacgcggcgaccacgcacaggcgcacccgctgattgcccagctgcacgaacagccgccgggctgtggccatcgcgttcttcggcgcttcgagctcgatgtcgtcggtctttaccgtgtcgcccgcgttcacaacggtttccgtcatatcgtcattctgcgttgtcattctcgtcacgcctcctctcccattgccggctccttggtctgcgattcgacgatttcgcggtacacctcgcagtccgccatcagttcgtcatgtttgccgatgcctgccacttgtccgtccgacagtacgacgatctggtcggcgtgctggacggtgctcacgcgctgcgcgatgatgagcaccgcacgcccgttcgtctctgcggcgagcgcatgccgcaacgcggcgtcggtcttgaaatcgagcgccgagaaactgtcatcgaacaccaccagctgggtgtctccggtcagtgcgcgcgcaatcgacagacgctgcttctgcccaccggagaagttcgtaccgccttgcgcgacgcgggattccagtccttgcggcagcgaatcgacgaactcgcgggcctgcgcgacatcgatcgcatgattcagccgctcatcggaggcatctcggtctccgtaccgcagattgtcggcaatcgtccccgagaacaaccacgcctgctgctgtacgtaggacacgcggcgccgcagatcgtgctgcgtcatcttgcgcacgtccacgccatcgagggtgacttctccccaattggcgtcatggaaccgcagtgcgagcatggcgatcgtcgatttgcccgagcccgtgccaccgatgatcgccgtggtctggcccgtcttgcaggagaagctgacatgtcgcaacgtgtcctcctgcgcgtccgcgaaacggaatgtcacatcgcggaacgccagcacctcgccgtccgggagcggaccgcgaccgctcatatccaccgccgcgcccggctccgggtcggcgatctgcggactgtgatccagcaccagccgcacacgctcgcagcattcaagcgccctcggcaaggtgatgatcaccatctgcgccatcatcagatagaacagcgccatgatcgcatactccacgatggcggtgatgtcgccgatttggaagtttccggcgctgatgcgtcctcccgcgaggaaatacacgacgacgatgaatgcgttcatgccgaagtacgacaggccgtcgaggttcgcgaatagccggttcgccttgatggacgtatcggcgtagtcgacgaacgtgccgtccatgcgccgccgctcatgggattccttgttgaaggcgcggatcacgcggacgccggtaaggttttcgagtagcacggcgccgatgcggtcaagcagtttctgcagtttgcggaacaacggcgccgcggatcgcatgatgaacagcgccacgacgcacacgaaggctatcgccaccagcagccacagagacagggtcacgtcgagccggaacgacagggtcagcgcgatgatgaatatgatcggcaccggcatcagcatgcacagcacattggtcatggccatctggatgttgaccacgtcgttgatcgttcgcgtggttatcgatgccgtaccgaaattgcggaaatcatagatcgacagatccatggatttgcggtacagagccatgcgcatgtccttgccgacgcgagaggtcaactgcgagcagcaccatccgcccgccacggcgcacatgccggaaatcagcgcggccacgcccatgccgaccgccgtgatggtcatcttcttgaatgatgcggatgtcgcgctttcgttcagcagctccgcggcgaatgtgggaatgaccagcgcgccgacgacatcgaccagcagcagcaccgtcgtcaccgcgcacagcgcccagtatggcttcatgaaacgggcaaccagccgcatgcttcttccttcccctcgcgaagtcgtctacgctcatatctcagtattgtcccgaagtaggacaattgagccatacggcgtggcgaagtccgagacgggaaaactacacggaaatgtcatgcatctgtttgcggaacacccgcccgtagacgcccatgcccttgagcaacgcgctgcgcagctcgtcaggaagctcgctcatcgcccgatactccgcggcgcgactcggcgcgatcaagctgttgcaatatctgcgcccggcaggcgtgaaacggaccgttttgacccgacgatcgccttcggcgtccccaagctccacgaacccatgcgccacaaacgatgcgatgacattgttgaccgtctgccgcggcaacagcgtgtactcgcagatcgcccgctgcgacgccccatcatggtccttgaggtagtccagaatgcacatcacattatccgacactccggctcggcgagcgtaatccgaatacgccacgtcaatgcgatgcagttcatcgaagaacagatcgatatgactcgcgatcgatgacgcttcaatatcccgagccatgtctctctcgccgccatgccccacagcggcattctctgaattgtccgacataaggacaatcatacaggcatttcagcgattgcgccagagggaacgcctcgccgacagcacacgatcagagtgtcggctgaatggggtacggcaggggaatgagatcgccgctagcgtcatagaactcacgtaggtttatggagcgcacgcccatcgccgcggcactcagccacggatcggccttggtttccggctcccactggcggtatgaggcttcacggtagagtccgcaggtggctagggtgtgtttacgctaattgggttttggctgtgtttttcaggtagatgtgtcgatgaggatgagccggaggtcgacgaggaaggcctcgtcgagcctgtcgtagcgggtggcggccttgcggtagcgcttcatgcggttgaagacgcgttcgaccatgttccgccccttgtacgcctccctgtcgcaatcccatgggggcgtacggttcctcttgggcggcgcgaccggcgtcaggccgaacgactcggccggcggccgggtgggatccccctcgtgcgcgcggcccatgagcaggtgctccatcgcgccgcccccggaccagcggttgaaccgccggtagacgcccacttgccgtggcgctccggcaggcccctccacggggctcccgcgcggcacatccacggcagggcgttggcgaacgtgtggttgtcgaccgcggcggggctccggcgcgggcgcggcaacggatgagcgaccctcatgaaccggtcaagcgtgatgtcacacctcggcgtacacatacgacaattatcacgcaaaacttaaatacaccctaatgtattaaataaatatatgtaatgtcgtcatcgccgatcgaagcgaggtccggcccaccgcccctgccacacttcacggaaacggacgcgacccgaaacatggcgggccgccattccacaccatgacgtatttggccaaaatcggcgtttcgtggccaaaccattgctttcgcattgaacgcagacatttcgacgggcctcccgaggacccgccccgccttcaggcgcggcaggtcctcgtcggacatggtcagcggcccacgctcgcgcgacccgacggaacagcgcggctggaaccggaggaacagacatccaggggcgggcatgcggcgggaagacgacggcgtgtcctttccgcccgtggtcgaatgaacccgtacggcgccaccgccggatccggacggcatgggcgttcccaccggacaccggccgcggcggcggaacccgccgaacggtcgtcggggacggaacccctccatcacggcgcgggacatgggcgtccatcgtccggccggaccgtccgccgttcctcctcgagcaggtggatgatccgttcggtccgggatagcaactcgaacaggccatccagaagatcccgcgtcgccgcgaggatcctttcgtccgcggacaggccgtcctcttccggcggcgccgggaccatgaccccgtcgacacggtccggccggccccaccgggcggtgcagcgttcgatgcgtttcccgccgataatcagcaccggcagtccggcgttgcggaagatctcggtcactcccctgcctttcccgtgctcgcggaggaagtatcttttgaactcgtcggaatagatgatgcgcgtcggagtgacgttggacactgcccacaggccgcgcaggtacgagatctagtcaggagtgaactcccttctcatcgccgttcctttccgtatgagacgacatatgcggcagaggccggcagcccatggcggtttccatgggatgccggcctctcagacggacgtccccttgagggagaagaacccgaagggccgggggcatccgtcagaccgttcaggcgatggcgctcgccttgcgggacttgacgccgacggtcacgccggcgccgatcaggagggccgcaaccacggtgaacagcacggtgcccgcgccgccggtgagcggcagctgggtgatgctcttcacgttctccacgaccacttcggcggtgctgccgtcggagaccagtccccaacgatcgctgctgacgccatcggcgtcgatcgtgtaggacggtttcgcggtctggtccgcgccggtgccggagaggttggccgcgatcgtgaagctgaaggacacacccacgttgacgtagccgttcggggctgcgatctcctcgatggtgtacttgccctcgtcgagggccgggaaggtcacctggccgttcttgccggtggtgaacacgccggaggtggcatcagcggcgggcttggtgtcgagggtgctccacttgccgttgccgtccttgtcgggggtgtaggcgaggtacttgccgtcggcattcttgatggcgaacttggcgccctcgagcgcagcaccggtggtcttgtccttcttgaccagggtgtagtcgaagttgaagaccttgaccggggtgcccggcacttcctgcttgctctcgttgttgctcggatcgttcggatacttgatcgtcggggtgttcgcggcgccggtgttgccggtgctgccggtcacggtggccttgtattcgacggtcacggtcttgccgaccaggccggcgttggtgaacttggagtcatcggcgggggtgccggtaccgaagccctcggccttgatgtagccgctcaggtcgatgatgaaggtcttggacgtggcgtcgaagccggcgaccgtgtagtcggtgccggccctcagctgcttgttatcgaccgtgaccttcagggtgccggtcttgtaggccagtggcgcgttgtgcgcaaacttatcggacacggtgaactggtaaccgttgaccttgtagcccacgtagttcggaaccttggtcgtgatcgtgtaggaggcatcctgcccggctgcgacggtctggtcggtcacggtcttgctgaccgacgcggtctggttcttcatgtcgatggaaccggaggagtacaccgtgttgttgatggtcagcttggtgccggcgaggatcggcagggccttgctgctcttgccggtcacgacctggtcgacgatcagccacaggcccgggctgtccagcgtgaacgtggcctgcttgttgtcgctggacagggccggcgtggcctcggtcgtggccttggacgcgagctggtcggcgaggccgcgggtggtgccgtcgcccagccacgggctcgtggcggacttgtcgagcttggcctggtcctgctgctgcgcccaggcgagcggatcgccggtgcccgtatacttcaggtatttggcgatatccgtcttgaggccgtcctcggtcttgagggtgacgctctggttcggggcggtgccgtacacgtcgtaggacgcgaccttcacggccttgaacgtgtggccagtcaattggtccgcgctcgtggcgttcaacgtgatggtcttctcaccgtccgtgacgacctgcgcgttcgcgctggaggccgcgacggcccccagtcccgcggcggtggcgatggccgcgaccatcgccgtgatcttagtgaatttcatagggaactctccttctttcatgaaaaaccgttcggccggacgggccggacgggccgcgcgccgcgcgtgcggcgcgcgaaatctgtcgctacgccctggagcgtttcgctccgaggacggccagcacgagcgccgcggcgatgacggacaggccgagcatcgtgttgttccgggcctcggacgcgcccgtcaacggcagcgcgctctgtgcgacccgcgtgttcgtgaacgccgccttcgcgatgccggtggcgtcggccgtgtttccctcgtcgtccttggtccttgcgatggagacatggacggtgagggcgccgctggatgcggtgccgccgatggccgtgatggtgatccggtatccggccttcgagcaggcaaggtcgccagggcagtccgtccggtccacggccgcgtcaaacgtgtacgtgccggccttggacacggtcgccgtggccaaggtgaagtccttggccacgccgtcccgcagaccgccgacggaccgtgttttggataccttgatggtcttgtccctaacggcctgtctggtggcctggtcggatgggatgaacgtgaacctgaacgcctcgccgttcttcgaatcgcggccggtcagggttttggagccgttcacggtgaccgtggcgggtgtcgggctgttgacgaatccactggcgaacgtccagtcgggatgcgtgttgtcgagcgtgaacgggtggctactgtcatccttgtggaacccggacggggcttgggattcggtgagcgtgtatgcgcccatgtcgaggcctgtcaccctgaacgatccgtcggtccgatcctcgtcgccttcgccgttgtccgtgatggtcctggactggccgtccgggccggtcagggtccaggaggatccggccagcggattgttttcggtgtcggtcttgcgccatgagacggttcccttgcgggtcttgacgtcgaccagccgggtgtcgaacgtggcgcggccgcattggtctttgaccgtgaccttcacatggcatgggccttcgttcgggaacgtgatggaagtggccgatccggtcgggtcggagaacgacgcgttgcagtcggattgccactggtacgtgtatggcggcgtgcctttggtgacggtcacggaagcctgcacggtcgatccggccgtggcgtcggacgggatcgtggccttcacgtcgaggcttttctccactccggacaggatgaggaagttcaggaacgctcgtatggcgttgcggtcggcgtcggtgtttttttgaattcgtgtccggcctcgtacatgaccatgccgttgccgtagtcgccgtatccgggacccacggccatgaacacggccggaccgggagacataccggcgaggacttgccactggttcgggtcggtctccagcaccctggtggtggcgcgccacgcgctgccgggggcgggcatgtagatctcttccgctccgttggcgtgcgcggcgaacgtgttcccgacgaactgcatgatcgggtccgacgcggcgcccgccacctggtaggcgccgcttacacccgacgctcctttatgcttgtctccgatgagcaggccgttggtggacaggaagaacatggaaccgtcatccacgcccttgcccttggtattgctttcgagataggagacggcgtggcatccggcccagatgtagccgccgcccttgttgaaggaggcgagtgggctatgcgtcgctgtggtcggttcggcgtgcggcatgacgtagatgtcgtcgcaggaagagtccaggtccgccggagtcgctttttctttgtagacgcggtcatcgctggcattctcgttccgcaggatgccggacttgactaggtacttcttggctatatcgccgttttgcttgtcgagcacgacgcgggggaccgaggagatcttccggctgtcggcaaccgtgacggcggtgtcggtgggcccatcgatgcgcacgccgtagccgcgccacttgaacagcatcgacctgacgttgtaatcgacgtcgtcgccggatatgacgaacgggccggagatgtagttcctgccgttgtaggtgaggtccacgccggtctggctggtcttgctcccgttgatgacccagtacaccgggaccttggcgttgaggacgagatcgtagatgaggccgtatggtttgagctgggcgtcgtcagaaaaggtgtcgcccatgtcgacgatgtacgagccggcagggaacgtgatctcgcccgtcttgccggcggacttcaccgctgtctccgccgaggacgtgccggccggcatgtcctcaccgctcgcggtgccggccaccgacaacgcgagcaccatggcgagggcgaccatcacggccaggaggaacctatccccccccccggtggtttttccgttttccgccattctcatcagtgcttccttccaatgacggaatcggatttcacgcccgaactatgacgccgcggatcagaatctcttgtgaacaacagcggtatgcacaacgccgcgagcacgtaggccgccaccacggacagagggaccggacgcgggtcgacgacctgtgactcgtccgggatctcgtccgggatcgcggcgcgcagtccggacacgagcagacggtgcgtgttcaccccgtacggcgtgcatgtcatcagggtgacacggtcctcgtcctcgacgattttgagtttcgacacgtcggacggctcgatcacgctgacgcggtcgaccttgtagcccagggtctcgcccatcaccttgacgtagaaggaatcgcccttcttgagctcgtcgagcctggtgaacatcaatgccttgatcagacccctgtgcccggtgatgaccgcgtgcgtgcccttgcctccgacgggcaggctgctgccgtacaggtggcctgccccgagctcgagcgtggattcggacgtgccgtggtagatgggcaggtcgaccccgatcctcgggatgtcgaccgaccccatgacgccctcgccagcgtcaagcatggagaggtatctcttgtcggagacggaacccctcgtctgcgtgaacgggtcgttggcctcgccgaggacgtactgtccgtgcgaggcgaggttgcggttgtacgcgcgcgcctccttcaattcgttctccgcccgctgatacggccggtccgcgaccgtctcctccagacgaccggacgtggcggactgttccccggcggaccacgactgcagcatgaccggcacggacaccaccaccaaccccgatacgacgagcgcgacggacacgacggacagcagccttcccctgaacgacgcccggcggcgtgcgtcgtaggccttccggacgtcctccaggcccaggacggctccccaaccgcggacgatggtcttcgacgatgccggcatgcgcacctccctccggacggatcggcttggttccctcactgcggaaggcagaataacgcggaacggcgacgagggacgtcttccatccgacgcgccatcccccccccgccgtacgaagccgggattcctttgccgcggacggcagccacgacatcacccccctcccctttgccccttctttccgacacgccgcatttctgaaggatgccaccccccccatatcgtctcggcggtccgtcaggaacgacgggcggacggccgttcccatgaatcgtcgggctcgctcccacgcgcggggccggttccatgaccggtacggccccggcctgtcttccgttgtgttctgatgctcctaatacattgtcgagcgtttgagcatgttgtttcgggtcggcgatggagtgcatccatcggagcccgttcgtcatgaaggacatcagcgagcggtttcccgtcgccgccgaccatcacttgaaaaacactggccggcacccagaagacacggaaatggcgatcccctacgttcggagccatgaaatccttgaagtaacaatcgtatctcgaagattccggctcgcttcgactccctgattgttaatcgtccgatatctaatcagctcgtcttcacgagcttcaggaaccacggaacgcaccaacgcaccaaacggcatctgcaacgcagaaccaatcgtggatagcttggtaaaagacaagtccaacggagcatccgcatttagccattgaggaagctcggcaagaccatctctatgtgctacagccaccggagcgtggctggatgtacggtaatggacgccatcgtcacactcccctctgatatcgcagatgaaaagatccgccacatgtaagagcagcagtcacggcttcaggcgggtattggtaattttcatgatatccgaatgttggatttcaacacgagcaacgaatcgacggaaggaagcacctcccatcaggcccctaccagggccgaaagtcaatggcaagcaaaaagtccccggaaacgccgatttccaaggacttaaccgtgccccctgtgggattcgaacccacaacccacgacttaaaaggacgctgctctaaccgttgagctaaaggggcaacattaccaagatacacgcgaacaccggacaatgtccagtacggcgttgcgcgcaggcggcatcttgcgcgcgctgactgacgaccacccccagtcgctacgcgacagcccccgccagcgggggggggggcaaaagatggcacagtccctacgcggcagccctccgggccctgcaactacggatgtgctgcgcacgaccattctgctgctcgcctgtcagctcgacttcgcctacaaacagctccgctgtttgcttaacggctcagcccgccagcggggggaggcaagacagcagtcgccccgcgacgcactgaatcagatcaggcctagggtgacgaaggcgttggcgataccgtcgtcgtggatgtcggtggtggtcatgtcgcagaaacactcgatgccgtgagtggcgttgcccatcgccacggacgtgcccgcggccttgagcatcgcggtgtcgttgtcgctgtcgccaatcgcgattgtgtcggcgatgctgtagccgaggtccttcgccacatcgcacagggccgtgcccttgtcgacgccattgatgagcaactcgccgttgttgggcgaaatatcatcgtacgagccgtgaaccagcgtgaaccactcccccaaatcacgcgatacgtcatcaaaactcacatcgggatccgctccggagaaatacgatcccttgctcgcatggatgacatgccccagcgtggaaccgtccggcaccgcgatgtcgtcgatcagatgccagtaccgcgcgaactgaccgttcttccacacggccgaccccttggattcaagatgccgcgcatacccgcacgagatgtacatgccgtccgcgccctgccactggtagttctcgatgccgtgccgttcgaaatacgcggttgcggcgtcgatcgcttcgggcgcgatgtcatgccggaacagcacccgcccgttgacgtccgcctgcgctccggccaccgagatcacgccgtcgaatccgagatcgagaatgccgcgttcgatcttcggcatcgagcgtccggtgcagatgaacagcttgtggccgcgcgaccgggccgccttgcatgcctcctgcgcggagatcggcacttcatgccgttcgtcggccaatgtgccatcgatatcgagaaacaccagtttgctggacattgccacccttcccgcgccttctccaggcgcttccggtgcaccagtgtaggacttcgggcggtcttgcactccgtccgccccggcccggcacggcccggctcggcacagccccgcccgcgcacggcccacgacctacatgcgccctgccctggacgggtcgatggacatggtctggaaccggttcgccatgaaatcgttgccgaaatggtcggcgaagaactgcgtgatcggcgaatccagcgcatgccccgccatgcgcccgtaccagcagtcgaacgccatcaatgtcatcatgccgtcgatgaacagcagcacgaacaccacggcggtcagcgaataccgtaccttccacggaatcaggttgatgaacttcagcaggtacggcagcacgaacttgatccaggcaagccccataatcccccagaacaccatgtacttgccggaggtgcgcccgcctatcgacagccattcgcccgtgtaatcccaggccttgataccgaacgcgacctccatgaaccagctggagcagtactcgaacacgccgccgatcagagcgctggagaagaagatcagcacccagttcgaacgccacagccggttgagcagaatcgtcatgaatccggcgccgaacccgtagatcggcgagaacggcccccacagcatgccagcgcgatcctgatattcgccgtagtaataccagtgatatatcgtctcgaccaccagcccgatcatgcagccgatgacgaaaatccagaacaggttgaagaaatccagcgagatatagcccttgccgctcatgtcgcggccgaccatgcccttggcgagcgccgcctcgtattcgtcgcgctcatccatgcgcttgagcgcgcgctgcagccgccgttcctccagcagagtcgggtcaagggttatggcgagcgcgaccagtatggtcatctggatggacggcacgagcagattcgcgcccaacccgtccaatgcgagcgacagcagtccctcggcgaacgtcaccatcatgacgatatacgaccaccaggcggaataccgccgtcggttgcggatcagcagcacgcccagcacggtcaggcatgccgcgttggcgctggagaccaccgtctgggcgcatgtgaggatgaatgtcaggttcagcacgtcgacggtcacacggccgtcgagaatctcatgcaccgaatatcccgccatcagcacgatgacggggagagtgatgacgccctgcagcagcacgagcacgccgtagatgcgggcgatcagcggcagccgcctgtccgcggcatccttgccggagtggcttttcgcttcttgttcgacgtcggcgagtaccgcctggttggcgagtgcgtcgacgtccgcggcgagctcctgcccgtcgcgacgctgactggtcgtgtcagaggccatgcgtcagcgcttcgacgagcgtttgccggcgttcgcggcgttgacggcacgcagcagctgccaatcgcgtgtcatgtacatgccgaaggccacgccgaacgcgatcagccccaccatgtcagcggtgaacagcgagaagaccatcacgaagatcatccagccgaccgtccatttgaaccgcggaccgggctgcatgtgcttcacggccatatatatggtcaccgcggcgactcccgccgtcacgatggcgtacaggatgatgagcgccgtgttgctgctgttgcggctcagcgcggtcacggcctgagccgacgtccgggcggcctcggacgtactggaaatcacgccgaagtacgacagcgcgaagaagatggccatgccgaccgaatacacggcaccggcgcacatgatcacacgttccggcgttcgtttggagaatggcgagcgcgcattggctttttcacgctcgcgcagatagttgttctgcttggatgtcataacggcgatacctccgacgtcggtgtacgaatcatgttccatcgtaatacagtcagatggattacgctccttgccggaaagccgtgccgtgcgcgggctggggccgctccaccacgcccagccgctcgaaggcgtgcgcgaggccgctcgcgtccaccgcatcggcggcgtctttggcgcactgctccccgttgcccatcgcgatgccgatgccggccacctcgttcacggtcaggtcattgtcgctgtcgccgatcgccaccgtgtcggcgagcggcacgcccatggtggccgcagcgaaacgcagtccctcgcccttgctgccaggcaccaggtcgccgagcgtaacgccatcccgccgcgtctgctcgcgcgcggcgggattcgggtttacagctcctcgccgttggtggcgatgacgtgctggtaccagccgaaggacttcttgcggctgcgcttgtacgagccgtggccttcatcgtcgccgtccacgtagatcaggccgtagcgcttcttcatctcgccggtggtgaagctcaccacgtcgatgcagccccagaccgtgtagcccatgacgggcacgccgtccaggtcgatggccttcttgacctcggcgatgtggctcttgaggtattcgatgcgcgagtcgtcggcgatgtagccgttctcgtcgggcgtctcgtacatgcccacgccgttctcgacgatgaacagcggcttgttccagcgctcgtacatctcgcacagcgagtagcgcaggccgaccggatcgatctgccagccccagtcggtggccttgatgtacgggttgggcaccagcccgtcgaggccgtgctccatcgcgtcgagcgtggagccctgcgagctgacggctacggacatgtagtagctcagggagatgtagtcgacgatgccgtccttgatggcgtcgaggtcgcccggctccattgcgatgtcgatgccgtcacgctcccaccacttgagcaggtagcgcggatactcgccgtgcacgtacacgtcgccgaacaggtagcgcttgcgcatctgctcctgggcgagcatgacgtcgtccgggcggcaggtctccgggtagatcggcacgaaggagagcatgcagccgatctggaagtccgggttgatctcgcgtccgcgcttgaccgcgatggccgcggcgacgaactcgttgtgaatcgcctgccagaccttctgctccacctcgtgcgaggtgtcgtccgggttggggatgatgccggagttcgtgtacgggaagatcggcgtgtgcatgttcatctggttgtcgacctcgttgaaggtcagccagtaggtcaccaggtccttgtagcgctccatcaccgtggtggcgaagcgcacgaagcagtcgacgaccttgcggttggtgaagccgcccatcttggccaggtgcaggggcatttcgaagtgggagagggtgacgaccggctccatgcccttggcgcggtagtcggagaacagctcttcgtagaacttgagtccggtctcgttcggctcctcttcgtcgccgttcgggaaaatgcgggaccaggagatggatgtgcggaagcacttgaagcccatttcccggaacagcgcatcgtcctcgcggaaggtgtgataatagtcgatgccgcggtggttcgggtagttgagcccgtcgatcacgccgtcggtgatcttgcgggccacgccggccgccccgccggtgagtacgtcgcagatgctcgggccgcggctgtccacgtcccatgcgccttcaagctgatgtgcggcgaccgcgccgccccagaggaaattctcgggaaatcccatgatgcttgttcctttacttgtgtttgccgtacgtgatatgcgtgtcgtgcgccgaaggccctcagccgttgagctttcgatacaggtcgatgagctcggtgaccatgagcttcacggtctcggtcgacatcatctggtcttcgacgtgggtgagcagcagcgacatcgtgaccgggtcgccggccgcctcctgctgcaccagcttcgcgtgctgttcgtggccgaccgcgtactgctcgtcgccggacttcatcttcgcggcggcggtctcatagtcgccggccttgacggcctgcagcgcttccatgtaatcggatttcgcggagccggcagcgacgatcatctgcatgcacagcacttccatgtcaagggtttcgggtgcgtccgccattggactgtcctttcgtcggtgttcgccgcgccggtcaccggctcgcggcggacggtcattcgtggggttgggtggtggggaatgagggagggaatgcccggcaccgtcgtatcgggcgacgccgggagagggagatcacttgccggcgagctcgatcgcgtggttgagcacgttctcgccgcgcaccaggccgtagtcctgcgggttgatggattcgaccgggatgttcgggaacaggcccttgacacggttcagttcgaagcgaacctgcggtccgagcaggatgacggccgcgtcgggcgccttctcctcgatctcggagatcgggtaggcgtcgatctgcacgtcgacaccgttcttgacggcggcttcgcgcatcttcttgacgagcatggaggtggacattccctggttgcagcaaaggacgatatgcatgatggtttcctttcgtggggtgcggccttgcggccgcgctgttgacttgttggcttgttgagggggttgggttgaagttgtgtcgtgcggaccggtcgccggccgcagtggccggccggcggcctgacggttactcggccgcggcgtcctgctcctgcttgaggcagatcttgtcctgcatcttgacgaacgggaaccagatggcgatggaggccgcgaagatcagcacctggatcaccacaccctgccatccgccgagcaggaagccggagatgatcggcggcgtggtccacggcacctgcatggcgccgaaggcgggcaggaagccgatgaccatggcaccgtaggtgaggatcacggcgaccagcggggcgcaaatgaacgggatgagcatgatcgggttgtagacgatcggcaggccgaagatcatgggctcgttcacgttgaagatgccggggacgagcgacagcttggacagctcgcgcacctgggcggacttggcgaccagcagcgccgcgacgatgaagccgagggtcaggccgacgccgccgaacttgcagaagcagtcgataagctgcggcaccagatagtggccgccgttggcctgcgtggccttgatgccctggtccatgaggttctggttgaccagcgagttggcggtgagcaccgggtagatgatgccggagacgatgttcggaccgtgcagaccgcaccagaacagcagcgacatgagcagcacgatgatgatggcaccggcccagttgtcggtcaggccctgcatcggggtctggatgatcttgaagatgagctcggtcagcgaaacgccgccgaagacctggcacacctggtagatgatcgcggagtagcacatgatgaagaagccggggatcatcgcggagaaggcgttcgatacgccttcgggcacggcgtcgggcatcttgatgcgcaggttcttcttgatgcaggtggtgtagacccacgagccgatcaggcccatgatgatggcggagatgatgccgttgccgcccatccacgtgttcggcaggacgttggagatggtggcggtgtcgccgcccagcgccttgatggtgtcgctggtgaccgtcagcgtggagggcgagacgatgaggaacgagaccagcgtcaggatgccgcaggagatgccgtccatcttctcgttgcgggcgtaggagtagccgatgccgacggcgatgaccatcgcgagcacgttgaacgtggagttgttgatctggttgagacccagattccaatcgctgccgaagatccgggccatgaaatcggtgtagccggtgatcggcaggtttgcgatcagcaggaagatcgagccgacgagcgtgatcggcatggacagcacgaagccgtccttgagcgcggtgatggctttggtgctcgcgaatttcacgaacacgtcaagcgtcttttgcgcgacgttggtgaacctttccttcatcacaggagtccttccttggacatctgcggacttcgtagtccgcatcttctgttgtacttccagcacggcttttcagccttcagttattcgatatactttttgttgttcgaataacttgtgcttttagtatacggattatgggaatcctgtcaaatatggtcacatcgctgttattacaccgattatcggcataattcagccattgtcagcgctcactggtcaagattgcgacacgccggtggtcaaaatttattcgaataaattaatcgtttttacttcgacggctcacatcaggccgagccgttcgaaagcgcgggcgagcccgtcctcctccacatcgccggcgacgatgccggccatcgccttgatgtcctccgacccgttgcccatcgccacgccgaccgcgcagtactccagcatcgggatgtcgacggccgcgtcgccgaacgcgacggtgtcctgccgattcgcgccgagatgcgcgagcagccggtcaatcgcatgggccttggtgatgcccttgactccgagatcgccgaacagcgccgtcgctcccctaccgccccacgtgcccgattcgaggtcggggaaacgcccgcgggtgtcgaggaagtcccggtacgagccgagcacgtagctgatcttgttcacgtcgtcccggtacagttcaccgtcgaagatcatgtcggggaacgcctcgcgcacggtcaggcgattgacgttctccttgcccttgcgggcggaatactcgcggacggcgtcgagcgcgccctcctcgaagccctcgctggcgaacaggccgttgttgctttccagatagaattcaaggccgcgcggatggccctcacggccgagtccggcaggttgttgtcgtagtcgaccagtgtgccgtccacgtcaaacaggatgatcttggacatcgtcgtccgcctttcgtcgatggttgtggcggccatgcggccttacgagcggagccggccgccgcgcgtcagcgcatcgaggtcatcgtgaagaacctcgcgttgacgtaatggtatgcgatgaacgaggagttgaacagacggccgttggtcaggaacgagtcatcctccaggtacagcgcgggatcaccctcgttcagaccaagcacccgggccgcgtccgcctccagcttgcccgcgtacagcaccttgtcgacgaagccgaaattcagaccgaggtcgttgcgcgcgtacccgaacagcgacccctcggcgatctgctcattgatgaacggcacgaattccttgagataccacgccgtctcatatgccagcggattgccgtcgacctgccgcagacgcacgacacgccacacctgatcaccctcggcgcagtgcatgcgcttggccagcacggagtcggcctgcagcagcgacaactcctgcaccacggacgtcaccttgcgatgcgggtactccgcggaaatgccgcgcgtggtgccgatcgacaggtaatcgccctcacggtcctcgcgcacgaacacgccgctgccccgcaccgggaacacgtcgccggcctcggcgagcaccgcgatggcattgcgcacgcggtacctcgtggtctggtactcctctatcagctggtcctcggtgggcagcttcccggtctgccggaactcaccggcatcgatacggcctctgagagtcgtggccaattcgcggtaatcctgagccatcattcctcctaccgtctgattccgcccgatgcagcggcccccatcaccgccagagacaccgcatcccatgacatcatgattttatcgcacaacacacggttattcgaataacaacatgtacaatcgtacatgataatcgtaatatcgtgcgcctcggcaccccttatacgacaatggcgcttgggcgacatgccatgccgcccaagcgccatacgaaccgacatgcgattattgaatcgaggcctcctgccgcgcgacctccaacgccttgttgaaggcatccgacgtccagctggctccggccaccttgtcgaccttcaggtccttgagcggcttgccatcgaccacgccattgattgcctcggcgaagtcattctggtggttcttggagatcgtcgtgaacggatgccccacgatctcgaccttctcgaccttctggtcggcgatggtcaggtgcacgtcgatggaatcctctccgaccggcccgtactggccgttgatcgaataggtgccatccttgtagttgccggtgtccttcttgtcggaggtcgtggacttgcgcttggaggagctgtcggagccgctcgatgactgggactcgctctcctgcgacttctcggtctcgccggaattgccggcatactcgtcgttcatcggcgcggccttgggctcgccgcaaccggccagcaacgtggtcgccgcgatcagtcccgcggccgccaccgtcacgctcttcagcgtgcgggatttcgacggggaaccgccgtccgcaagcccatcatgctgcagagcgctgccgtcactcatggtcaccacctgtcttcgccgccttggtaggatcaatgaaatcaatggaagaatcgccatgctgcgcaccttcggcgtcagaaccggtggacgcaggcttgccaccggccgctacgtacgcatcatgtgcatttttatcattccacttctcgcccacgagcacgccgtggttgagcatgatttcacgctgggcgcaactcgccacgagagcgtcatgggtgaccacgatgaccgtggtgccctggtcatgcagctggcggaacaggtcgaggacgatcttctcgttcttctcgtccaggttgccggtgggctcatcagcgagaatcagcttcgggttgttgatcagcgcacgcgcgacgcacacgcgctgctgctcgccgccggacaactggctcggcagatggtgggcgcggtccttcagaccgaccttcttcaacgcctcaagggcctgcttctcgtcgacgaccgaatggtagtactgcgcgaccatcacgttctcgacggccgtcaggtgcggcaccagatagaacttctggaacaccaggccgatcaggttcttgcgcacgtcggcgagctggccggcgttcagatcctccagcttgcggccctccagcgaaacggagcccttgctcggcgtgtccatgcagccgatcatgttcatcagcgtcgtcttgccggaacccgacgagccgacgatggccagccattcgccctgcggaacggtcaggctcagatcatcgaccgcatgcaggtcgccgtagatcttggaaatatgatcgagttcaagcagcatatccatgattattccttaactattccaactattcctcgcgcagcacgaccgcggggtcgatgcgcgtggcgcgatgcaccggggggatggatgcgacgacggcgaccagcgcgctgaacaccaccgacacgacggcgagccaccagttgaaaccgatggaacgctcaaacacggtggcgcacagccagcgggccatgccatagcctgtcgccgtgccaagcaggccgccgagcaggccatacaccgccgattccacatagaactcgacgccgatggcatgcgagctcgcgccgagcgccttgcgcagaccgatctcattgcgccgctgcgagacgatggagctgatcgtggtgccgacgccgaccagcgtgaacaccagcacaaccagcgacacgatccagaacagcgtctgcagcatcgtgatgacgcgcgtgtcggaagcggtgatcttggtgacctgctgcgccttgacatgcatcgacgtcatatcgttgatgctgttgaccagcgcggtgaggtccgaggcgcccgacgagtattcgatgacgtccacgccgcgcgtggagccggtgagcttgtccacgtcgccggccagcgcgtagatgatcgaatcctcgctgccgccggtgtcaacgatgccggccacacggaactcggtgccggacgtgtccatgatgtcgctggagacgtggccgttctgggtctgctgggcgccggtggagacggacgaggtctggccgtctgacgtgccaccagtgccggactgcgccgtgccatcggtgccgtcagtaccgggctggctcgcctgtcccgaggacgcggcgttgtctgatgcgcggtagccgatggtgatgccgccgccgaccttcaagcccatcgcatcggcgacgtcccggccgaccagcaccttgcccgcggacggccaggagccgtcgacgacccaatgatggttgaggttcctgacctgcgcggggttgacgccggccatcacgtacggggccgcgttgacgcgcacgttctcgtaacggtacgtggcgtgcttttccgagcccttggcgctcaccatctccgtggtgtgctcgaccatcgcgtcatcgatgccggacttgccgttctccgaatcggcgagcggcgtcacgatcaggttggcgccataggctcgcatctcctgattcatctgctgcggcacggcgatgcagatcatcgccagacagaacagcgtagcggcgccgaccagcgacgccaccacggccatgaccgcgcgagaccgcctgcggaacaccgcactcaacagcatcctgaagaacataccggtattggtcatctcagcacgcctccttcatcatcgtcttacgatcagcgtccatgcagcacctccgccggcttgaggctcagaatcgagcgaatcgacgacgccgatgccagcagcacggtcagcgccagcagcacgaacaccagcacgaacaccatcgggcgcatggtgatgcccgaaccgaacaccacctgcccgatgatctgcgccacgcccgagcccaaagcggcgccgacgatggctcccagaagcgagatcgccgcggtctccgccatcatcaggcgcgacaccgcgccatcggtcgcaccgatcgccttgagcagggccagttcgctcgaccgctcgccgatcgaggcgaccatcaggttggccactgccacggccgcggcgagcaggctcagcaccgtcatcaggatcatcacggcctgggtcttctgcagcacgttgccctgcagcgcggcgacctgccgcacctgcttggcgaccgcgccgggaatgacctcctcgatctgataggcgattgagctggggtatgccgtgcaataccaggtctcccactcgtcttggctgagcgcggcggggttctgggccgccttgcgcgccagatcgttctccggcgttgtcagcgccttcacctcgatcttgtcgacggaatccggcaggtccgacagcacctgtgccaccgacgaggagatgtagatggcactgttgtcgtcgtcgccggaatcgtagacgccggtgatgcgaatcttctgctcgtgcgtattcccggccgccgtggtcttgcgcaaggtgaccgtatcaccgcatcccacgccgagctgctgcgcgagcgtcgtgccgatcacgccctgatcggtgtcatccttcggccagctgccgtcgagcttccaccatgagcgcatgccgtcgacgcccacgacggtggtctcgcccgacgcgagcttcagcgtcttgttgaaccacgtgccgactaccgccgccgccgtgccgttcacctgcgcgtggacgttgagttgcggtgcgaaattcgtgatgttgaacgcccagaaaatcgtcttgatcttcgccgcgtcggactccttcaggaacgaggtcgggtccgcgtcggactgcgggccgccctccatgttgtacaggtcggacaccaccgcatcggacttcggctgcacggtgatgttcgagccatacgtgctcagctcggcgttgagcttgtcgcccacgtcgaacacgacgcccagcatcgacaccgacaccgtggccgacaggcacacggtcagcgcgatcagcaggcgcctgcgtaactggcgggtgaacgagcgcctgatcattctcagaaagaacatggtctaaaccccttcctgccttactggaagtgggcgctcagcgcgtccaggtcggcggtctgaatggtgatcttgccgctaccggtcttgtacgggaacgggatcgggttgcacccgcccttgaagccgatggtcgccaggttgatggccacctcacacttcttgcagatgatcttgccgtccttctcgtagtatccggcgtcgccgcagttctcgcaggcgtcgaggccgatgccgtacgcgccgccgttcttcttgatgatgatgaagcgcatcacggtgccgtccttggccttgtattcgaagcggtgcaaatggccgtcctcgacctggctgaacgggatcgtggccacgccgtccttgagcgaatacgcttccggcggcgagagagtcggctgctggttgattgcggccacgcccaaggtcagcgtcgcggtaacgccgatcatcgccaccatgctccatgcggcggcggcgatcgcacggcgccggaacgccttgtgcttgcgcaccgtggccgcattgaagtcggccgcgagtcgcttcgcagaaaccggcatacgcaagccggccaccaccgaggcgacggcgggaatcaggaatatgaacgcttgggccataatcaaaccggacttgttgttgatcagccaggcgagcatcacgaacgcgatgtgcgggaaccgcagcgtgcgggcctgcatgatctgcagcaggccggtcagatgctgcatcagctggatcaccagcaccaccagcaccgcggacaggaacgccggacggaccgccgtcgaacgcatcgtgcggaagatcgcggcgatgaccgcggacgcgatgatgcccagcacaaagccgagcgcacgcagcagcatatcggacgtgaagatcgggtctcccggctcgacccagatggtcagctgcaggatcacgtccggcagcgcatagaacacggtgagcgcgatgcccaacgccgccaccagattggcgagatgcatcaccgcggcgtgccgacgccaattgcgggtgatcagtcggttcacgaacaccaacacgatcagcaggaggtcgatgaccacgcagcaccacagcaccgggtagttgatgaatgtacgctggttaatcaccgcggatgcacgcagtccggcgaacacgatcgccgccaccaatccgatgaggattccccacagacgccatcgggagctgatcggcttgtcacgcccctcgccgacggtcagcatcacactcatgcacatgaccagcaacgcgggccccagcgtgcccggcatcaccgctacgaactgttcgagcattcgcaccctttccttgttccgtctattatgttccgttcattccgtcataaaaacagcgaaagctcctctcgggcagagaggagcatttcactcaggcaatgtcaatcaccactgacgcggggtgtattcccagttgtcgaaggtgacctcgatcggctcggtccagaagcgacccttgacgccggtctcgggatcgacgtgcagcatccagcccttcttggccggggattcgatcgacagcttcagctggtaggtgccggccttgtcgagcttgacgttggcgccgtagtgcgggccgtcggaggcgttcatctgcatgaaggtaccggaggtggccttgccgccttcgacttccttgccggtggacttgtcgatgatcgtgtagttcacggtcagctcggggacgaagtcgcccttgccgtagcccagctcggtacccttctggttggcgtggatgtcggcttcgaggtggaagctcgaatcagcggccttcaggcccatggaggcgggctccatgtcaatcggctggaagtacacggcgccgacggtcagcgggccggcgtccttgtcctgctcctcggcggtgccggacgggccgaccgggacctcttcaaagcctgcgccggagctggagtcgtccttcttgtcgctggactgagaggagctgcccgaagacttgttgtcggaagcattgttggtggaaccgcacgcggacagcgagaaggccatggaaccggccagcagcacgccgagcagggctgcgatcttcttgttcttcatcatttctctatttcctttgttgtgtagtgaatggtattcacagattgttgggttgattgttcgcggcaccggccgtcacggcagccttggccttcgccttgcgctgcttgatgaagccgaccacgaacagggcgatcaccgtgatggccgcaatcacctgggcgatgatgcattcgacgtacgggtagaagccgatccagtcgttcgtcggaacgccttgcagatacgttgccgggagtgcgtcgccctcgatcagcgagtgcacgccgccgccggcgaacacgaccaccagcaccgacatcaggatcgacgtgaccaggaagaacggtccgatcggaatcttcaccgacgtgaagcgaatcacgaagaagatgatcagcagcaccaccgcggctgcgacggcaccaatcaccatgccatgcgtatcgcggctcatcgtgtaaatcgactggtagaagatcaccgtctcggcgccttcacggaacacggcgaggaagctcagcatggcgagcgagatcaccgtacgggacgcgaccttttcgccggcatcgacctgtgaggagacggaggccaccgcggcttcggtcttctccttgatgtaccggttccatgcctcgacgctggacttgttgagcatccaattgctggtccatagcagcatggccatggcaatcagggcgcacacgccttccatgatctcctgaatcgggccggacccaccgaacgcgagcacgaagatgaccgcgaccacgcctgcgccggcaagaccggcgagcacgcccacatagatccacttggtgaaacgcttgttgccggacttgacgaggtacgccaccacggccgcgaccaccagcagcgcctcaagaccctcacgaatcagaatcaggaacgcctggccgaccgagctggtgatgaacttggtgaagctgccttccttgtcggcggcaccgccgtcgagcttgccggcgtcctcgaccagcatggccttcaaatcgtcgacgagcttcttggtgtctttgagcgaggcgcctgtgttcatcgacttgcggcacatcttgaactggtactcgacctgcgagacacggtcgccgctgatggcgttcatcacgttcttctcgaagccgagcttctcgtagtactggtagtaggcgtcgttgacgagggtagcgcccttcgcgccgtcgccgcctgcgtacgacttgtaggccttgtcgaggatcggcatcatctcgttggccacgtcggtccagctgcggtcgcccttgccggggttcttcttctgcttggactgcagaaccttgcgctccttggcgatctgctcctgcagcgccttgtcgtagtcgcggggattggcgagcttggtgttcgcgtcgagctgcttggcggtgctgtcgaggtcggagacgagcgcggtcacgctctgttcgatcttcgcctcgttgcccgtcacatatgacaggtcctgaatgtcttggaacgcctgctgctgggaggcctgcttgtcggagccgatgttgtcggtcacgacctgggtgaagttggatgccacatagatctcgttgtatgcggccatgaagtcggacgtggaaccggcggtgttgccgtccttgtattccttctgcccctgctgcagctgcttgtccatcgcggcggcgacgtcggcccatgtgtcgtaatccgcggaaccgtcggcggccatcgcctgcggggcgaacatgacggccatcaccgtgaacagcgccgcgacgacggccagcgaacgacatccaaccgcccgaagatgcgctaccgcacgacatcgcatattggattcctctccatatcaacgctttctaaaccatctatgcaatatagagaaaaaaaacctgaaagaacagtcttgacttttgaaattttatgcggtaatagagcggcccctgaggccgaaatgtctcatattgtggtcatcgtatgagtggccccttaggggccgctctcaaaactcgcagatacaagacgtttttcgggtcccgttgtctaattgaaagtgcaacacccgttagattggagattgtccggataaccagtccgaagggatgttgcacctatgggagaagtatgttctcacctgtcggaagaggaacgccggggcatccagatcgagatcggcaacggcgcgagcgtcaggaagatagcccgtttgctgggacgcagcccgtccggcatcagcagggagatcaaacgcaacacgtgggttcccgtccgacgagaacgggtcctgccggccgtgccggccgaaacggctgaagacaggcccgtggacgggcgaatgctgcatcgccggccccgcgcggcgcagggccggccgcaggcgcgccaagccgcgcaagcgccaccgcctgtcatgcggacgcctgtgggcgcgggtggccgaatggccgggtcgcggctggtcgccgccgcccgtcagcggcaggccgcgcgtcccgttccccgacgaccccaccatgcgcgtgtgcccggagagcgtctgccgttgggtctgcgccgaccgccgtcgccgtgagcgccgggcgcgccgccttccacgcggccgcaggaggcggcgcgggcgtggcggcgggaggacgtcgcgtttcccgattcccggacgggttcccatctccggactggattggctacaatgtgttagacagttcgatgggggacgattgacatgaggttggaggccgacgatggccgacccgaggcatccccgccactgcgaggagtcgttcaagcggcggatcgtgcggctttacgagaacggcaagccggcgcgcgagatcagggacgagtacgacatctcgcgttccacgccgcagcgttgggtccagggcatccgcgacagcggctccgcgaaagccgccgacaaccgcacccctgagcggaacgagccggtcgagctgcgcaggcgcaacggacagttggagatggaggtggacgtttcagaacaggcggcgccggtattcgcacgaaggtagcagtgatgcgggccgacgcctcccgctgtccgatatcggtgcagtgcaggatgccgggcgttccccgctccgtctgctaccggatgaccgtgcatcccgaagccgggcgggtggatccgatcgccggcgacgtgcgcgcggtccggcgcgacggccatgggcgctgcggcgccgggaagatcaaggccgcgctggagcggaggggcgtcaccgcctccggaaggcgcatcgtcaacatcatgaaacggcggggcatggcgggcgcgtacgcgcgcagaacgtccgaaccacacaagacgcgggttaacgaggccaggctcgcgaacatcctcggccgcgagttcgacggctacgggccgcgcgcccacctggccggtgacctgacgtacgtgcgcgtcggcggcgagtgggcgtacgcgtgcccgctcatcgacctggcgaacaggggcatcgccggccacggcgccgacacgggccgcgccgccgacctggtcatggccgcgttcgccacgctcgacttccctctgaccggggtggaggtgttccgcacggaccggggcggcgggttcgacaacgcgaggatcgacgagctgctcgacgtgttcgacatcagaggatcgccgtcagggaagggcgacccgtacgacaacgccgtggtcgaatccaccgacaggctcctgaagaaggagctcatataccggaaccactacaccagcctggaacaactacgctccgaccccgacgactatgtgtggcggtccgacaaccaaagactccactccaccctcgcataccggagccccaacgaattcaccgaacaaggactcgtcccctaagaaaccgtccaacacaccgttgccaatccagacgccagccggggcattcgccggcgaactgctagaattgcaggaccgacaggggtgttgcacctctaaatagacatcgggaagcgtcattccggagccatgcgcgacgcctgccgggacacgtgacggacgcatggcggcatatggagggatccgtggcccgaagggttccggccggctgcgcgggctccggggaatggaccgccatgttccgcaccggttgccgcggcttgcgtccacggcgttttcggattccgggccgattgccggataccatggaatcattcggagggaaggttcaagaggaggaagcatggcggaggagccaggagaaccgtcggacggcatgacgcaaccatcccgggaaaaaccgcaatggggaaagaagctgtcgcaaaagtgtaaggcggcatggcgacggtgtaaggaatggatgggcgggctcccactgttcgccgcgatcgccatatgggctgttctcggcatcatcgcggttcttgtcgtcatggcggtggcatggccgattgtcaaggcggtcaggacggggaaaggcttcccatcctatgacatcatctgcataggtggccgcgtcatctgcggcatgctcggcgcacgcctctgtggatattgcggctgcaatatcgctcggctgatcaaatccgcatcgggaggggttgccgtctgtttgaagaaaccgatatgttgggcttcggtcatgatagcggcgtcgtgcggatcggcgcacttgatgctttccctgtcctcgttaacggcattttccctgtcctcgtcctggccgtggatctggcgggttttattgctgggtctgtgtgtcttcgtgctttccgtcgtcctgcggttgctctggcagccggcgaaggaatggatggggggagctcccactgttcgccgcgatcgccatatgggccggtatcgccatcggcgcgtttcttctcgccatgtggtggctgggacgcgtgccgttctggcagctgaaactggatcccaagaagcaggcggaaaacatcgtcaagatcgccctgacccttgtcggcggcgtgggcgcggtggcctacctggtgatcaagtaccaggaacggcaacaggccggacgcgcggaaaaacgcgagaaggaccgcaccgtcgacacgaaggtacaggctgccatcaaccaattgggctccgacaaggcctccacgcgcatcgcgggcgtctacgcgctgacggacatcgcggacacctacaggggcggataccggcagcgcgtggtggacatcctgtgcggctacctgcgatccgatcgcgcgaattacgcgcttaacgagttgggacagcccgtcaagaacgcttccggccatctcgtcaaatctggagactcggacgaggccgtggaatccaccatcctctccgtcatgcacgaccgactgcgcaagaaacggaaagacaaaaccggaaaaaccatcgtgcggcaaacggtggatgacgaccaactgtggtgcgactgcgaattcgacctccatgaagccacattccacgaagtcgtggacctcacgtattccactttcgaatgtgtcccaaactttcgcggaaccaaattcgaacacggcgacttccatgggacgcacttcgcaggcaacgcggacttcggctgggcgcacttcgcaagcatcgcggacttccgtggggcggacttcgcaggcaacgcggacttcggctgggcagacttcgcaggcgtcgcggacttcggcggggcgaccttcacacgcgacgcgaacttcgacaaggtgaccttcacactcggcgcgtacttcaccggggcagaattccgcgccagtgcggcattctcagtaattcgaagtcaactttcgttcaatttcgaagcatgcaagttcaacgagagattccgtgacgcttatgagtggaggccgattccaattccggaggacaacgacggactgcccgcaggcgcggtgtggaaggatttccaggaggaggacgacaaggacggcggcacgacgacccggtagtccgcggcatcccctgccgtctccccgtccggaaaggaacatatgtgaacgtatatgggtcccatgtgggattcatatgggagtcttatgcgaacaggccggcttggtcagtcggcctgttcgatcctgaggcggatgccgcatacgctcaggcgggtgggaccggtgcccgacccggcggggtatttcgcaaacggaggtttccggaacgtcggggggcttaccgcggtccatggttttcgtgccgcgacacgttgacggcgtgccggatccatcccgaaatcgaggaatttttctgtccgacatggcggatcatatggcccggcggtgtggtcctaatcgacactccaagaacgaacacggcggtaaccattcaggtcagagtaagcacgattgatgttccgtggtccggctgatctacgactttggtctgctgcggtgtcctagtctttccacctgtcctctcattcattctgttccctattgaaatgagcggaaagatcacgcgtgtactggacgcgggcgctagaggtcatgttggttttcgcatttaggaaggaaacagaactaggaaatacctactagatcaaccactttgtagctatttcaggcagctcggtcggcacttctttaccaaaaagatcgttggggacgtgttgcatctaccgttcccactggcacggtattcgtccgcacgcgttccaccatgccgtaccagcggttcagaagctaggaatgcgtttcagcctgttgcacagcattcagctcgccatccaaaaatccacgaaatggatgtggggatgtttcgctgtccgaacgacgctggctcttccgtggaagagccagcgcaagaggtcagcagcataggtcagcgacgaaaatgcacgacgcccatccaccattcgttggtgcgagaagacttggatgctcgtcgtttccagccgaaaccgagggtgaatttaacatcggcacagaatcgttcgtctgcgttgtcacgggccggggatccggcgcgcccgttaccgtggttggtatcgtcccggtaaggttccgtcgattccaccttgtccctgttctttttttcgggcaagaggaacgacacgcggatggctgtaatgagaagggcgatgattgagcacaggcatgtgcatgccgtgatttcgccaagccggtccagggtgtctttcctgccaagtccaaaaaggtccatgaagggttggacgggaatcatgtcgttgacgatataagcgtaggccagcgagacgaaggtgagcaggagccacgcgatgaagcagagaagcttccacttggatcttctgccctcgtattcgaccagactctcgaaggacctgtccatcgtttcctgcggcaaagcgcccgtctcgccttccgcattgatggagtagtcccgcatgtcgaagcggaactggcggttcaacgtaatatgggcgtatatccgggcgccggccgctaccgtcagacccattatcaacaggacagcgaagaaagccaggagcagtttgagggagaccatgtcatcgttcttttgggaatagaccaaatacagccatcccaatacggctgctattccggcctcgaatccgatgaggcattttgaggcgcagccggatcccaatctctgtcggatcgccgtgctggccattcccagccgtacgtagttgctgcggttgaggctttccatggcctcgccgttaaggagcttccgttgcagacggacggctgcttcaccgttccgttccaggtgcgattccagttttttgagtttctcgaatttcgagtttatgcgggagatgcttgacgtcctgagatcagggatgtctttgagaatcccgccaattgttaccacattcgtcagtatcgtgaccagagattgcagaatattcgtaatggttttccttccatagtccatttattgatgtcgcaagtggatcgttcttgtccatggcagcttgagcccgatctgtgcgcggcctagatcagaccgcacacagatcagaccgtcggaggtgccagtcactgaacagacccggacggggcattgcgtttcatacgggtcctatccgccccgtccggggcgtggctccgtcaccgctgttcgctcatcagcctttcgaggagcttcttggtcttctcgccctccacgatgcggtagttggactgccacagcgtcttcatcttgccggccgcgttggggttggtctccgtgtcgaacgtgttctggaccaaggccatgccgaccgtgtcccacatctcgatcgggtcgaccgtccactcgacgccatgcccgtccctgttcttcgagagcagcgcgcggaacgcgccgaagatcggcatgatgtatcccgcggacacgtcatagtcaatggccttctgcgtgaagagggtcttcgcctttccatcccgcttctccacgccgcggaggttgccgaagttgcccttctgcagtccgaccgcgagcttgtagtccttgaacttgcgaggcatgtcctcctggatcctctcgtacagggccacgaggtcgggaagcacttgggcaagctgcaggtaaatgttgtcctccgacgggttcgacccgtcctcggtgtgatggtcgtcccactccttccggtagtccttgaacaccgcggccttgccggtgtacgaggcgatcggcaccgacagggcgtccttgaagcggtcgatgttgaacgcgtacatgagcttgaggagctctgagaccggtgtggtcttcccgctgtcgttgtccttgtacgcgatgttgtcgccgtagggctggtccgcgatggccttcttgatgaagtcgaagcggtcctccaggttgaacagcgcgatgtcgctgacctgcacggacgtgttgcgcgcgtcggacagggccgcgacgtcgaggtcctcgccgacgaagacctcgagcttgacgaacttgtcgatgtcggacgggatgtcgtcgcggcgatccatgatcgccctgtacgtgtggcctccgtcgaggatgccgtagcgcgacgtgtcgtcgtcgagatcgaggtccaccatgctgttcgccgcgtcgagcttcacgctcttcgcgaggatgacgatgccgcggttgtggatgtcgaagtacgggtccgtgccggacacggcgtcgaggagcttcttcgccgtcatcgtcttcatgttgggcttgcgggggttcacatcggtcgggaagttcgccggcaggtcgcgcatgttgacccagatgaaatacgtcgtcacgctggagtcggacggcgacttcacggtgcgcatggtatggatacggaatcgttccttcatggttggtttcctttctcgaaggagctggaagccggtcttctgatcggcatccgtctgtcatcctttgatgaagacgattaccatcatacccaagccactggattccacaatggaaccttggtggtgttttggaaccttggttacccttcgtattatgatgggcggtatgacagtacggaaaaaggacctgaatcccgcattgcgacgcgtgggcacgatcatcaagcgtcaccgcatcgatctgatagacataaacccgtcaagatccgatttcatcttggccgccacgtcttcggggcttcgtgcagattggatcagcgagaagagcctagcgaacatcgagaacggatacaacttcccttcgctccccaccctctacaatctcgcgatcgcctgccagatatcgcccgcggacctgttcgaggaagtcgccggggccttctccgcctacgattcgacggacgatgggctcgtggattagggagacgcggagtcgtcaggaccggcgtcctcgtatggggtatttcgcaaacggaggtttccggaacggatcccggaccaggggagacggtccccgacactccggcgggagacgtcccataacccgtcccgcaatcaacgttccgaaacccgatgccattgacgggtagtggtatggttcgtcgcatgacgagcatgatctacggatacgcacgagtcagcaccaacgaccagaccaccgacctgcagagggacgcgttggagagggccgggtgcgacaggatcctcaccgacgtggcctccggcgcgagggcccgccgtcccgaactcgaccatatgctcgacctgttgcgcgagggcgacaccgtggtggtgtggaagctcgacaggctcggccggagcatgcggaacctcgtcgacctgatggccacgttcgacgagaggggagtgcggttccgctccctgaccgaatcgatggacacgagcacaccgggcggcacgctcgtgttcaacatcttcgggtctttggcgcagttcgaacgcgacctgatccgcgaacgcacccgcgccggactcgaagccgcccgcgcccgcggcaggaagggcggacgtcctgccaagctcgacgagaaacaggtcagggaggtgcggaggctgtacaagtccagaaccgtgacggtaggccagatcgccgcgatgatacacgcgggacggtccaccgtctacaggtgtctggacgcgtcggatgatgcaaatgccgaatgacccttatgtaaaagggttcccggtccgatcatcccaccgtgccacctgcgatgaatcccaggatcgcgcctctccggcttctgccacaccattctgtacatatgtggtcgttcatgacttccattggcatccaggtgttcataaaagcgcagaaatgcggtaaaacacaccccgttgtctaattgaaagtgcaacacccgttagattggagattgtccggataaccagtccgaagggatgtcgcacctatggggaaggtatattcgcacctgtcgtaaggggaacgccaggtcatccagatcgagatcggcaacggcgccggcatccgcgggatcggtctgatgcccggccgcaacgcctcgacggccggcggggaggccagacgcaacacgtgggttcccgtccgacgagaacgggtcctgtcggccgtaccggccgaaacggctgaagacgggcccgtggacgggcggatgctgcatcgccggccccgcgcggcgcagggccggccacaggcgcgccaagccgcgcaagcgccaccgcctgtcatgcgaacgcctgtgggcgcgggtggacgaatggccgggtcgcggctggtcgccgccgcccgtcggcggcaggccgcgcgtcccgttccccgacgaccccgccacacgcgcctgcgcgacgagctgggcatggacacgtgcttcgccgacccgtactccacaggcagcggggaggcaacgagaacaggaacggcatgatccgccggtatccgcccaaacgcggcgagatccggatggacatggccggggaactgcgggagattgtcgacgaggccgacaaccgtcccatgcgcgtgctggactaccggacgcccgccgaggcattcgccgacgaactgctagaattgcaggaccaacaggggtgttgcacttctaaatagacatcgggaggcggctgcccccgctggcgaaatgctacgctgaggggcatgagcggattgcatgggcggatgccgtatacgactgcgtttgaacgcgcgatgggcaccggaatgatcattcagtcggcgacggctctcgacgacggcttccgctcgaaactcgacgcgttcatcgacgggtacgagtccgtgctgtcgcggttccgcgccgattcgctggtgaccgcaatgggcgaatcctcgcatggcggctcgtttgattttcccgattgggcctccgggctgttcgatctggccgatgcgttctgcaccacgaccgacggggcgcttgacccgtgtgtgggcgaggatctgatccggcttggctatgacgcacggtattcgatgacaatggaacccgatgcggagcatcatctcggtgccgtccacgggcgcccgacatggcgcaacgatgtggagcgtcatggcacaacgctggtgacgcagcgcgcggttcacttggatttcggggctttcggcaagggatattgcgccgatctgatcggcgcgatattggacgggcacgcgggcgatgaaaccgtccggcaatccgccaccggccccggctctcacgcgccctacatcatcgacgcgggcggcgatctgctgatccgcacgggcgagtctgctcaaccggccccactcgccgaggggtcaggacacgacaccggcgacaccgtcaccatcgccctggaggatcccgccaaccccggaaccgaggcgatcggcatcgcaagcatcgttgacggggcgttctgcgcgagcgcccccagccgacgccattggggtgaggaggcaggccgtcagctgcatcatctgctcaacgcggtcgacggccgtcccgtgcgcgatgtcgccgcgagttgggtctatgtgccatcggcggctggccgaccctaccccaccgcgctggcggatggactcgccaccgcatgcttcgtcaccgcaccggacgagctcgcccgcgcattcgacttcgaatgcgccgcggtgcacgccgaccgcacggccatcatgagccgtcacttccccggcaacttcttcaccgtataaacaatgcgggagggagcacctgcgtcatgccaccgccaggttttcttgtgcctattcgccacgctcgcacatcagtggcgccgacacgtcaatcgccgcgccgagcggtgcagcaagcaccttatggatgtccggagcgatatacaggttgccccttccggccggatacgcacggagtatacccacggacaccagacgagacagcgcgtgctgtacggccgacgggctcttgccgaaccttctcctcaacatactcgccgtgacggtgggctgcccgatgaggtacatcgccgtctgcacggacaggccgctgtatctgtgctcatccaatagactgcgatacctctgccgcacattgacaagacgcttcacgctcagcagcgcgtcctcacaggattcctcgatgtcttggcagaagaacagtatccagtcatcccaatcccctttcgtggaaacaccgagcaatctgtcctgatattcgggtcgacggcgctcgaaccacggggatacggacagcagcggctggctcagcaggcctcagtcatcatctgcaacagcaccagcaaccgcccgattcgcccgttgccgtccgtgaacggatacatcgtctcgaactgatagtggaacatcgccatatccagtacggccagtcccggctctttacgtgacctccaccagtccacaagcaactggacgactatatccaggtctcgaccaggaggcatgggcacgaaacgcgcatcctcgatgcgccgcgtgggtgagccgatgaacacttgggtggatcgtatatcccaggcctgtggattgtctgacttcgtgcccttcacaagaagcttctgcaattcgcgcacgagaggcaggcttatgggatgcccggactgaatctggcctatgccgcattccgccgcgtcgaggtagttcagcacctcgcgcatggactcgctcagcccgcttttgtcctcgcccacctcataatcctgagcaagaacggtttcgagcggctcgaacgtgccttccagggcgctggtgctctgcgcttcgcgacgcatggtcaggcgacgcggcatatcggggttgggcaggtcctcccccagctcgccgggcgcatctggcgcgaacatttctttctccataacaccagctgtacatattttttaaatcattcatactaagatttggataacgcccgattttttgcgcactttcggattccgggtctgacgtaagagggcatggcccgcgtcctgtgtacgattttcattcgccaaaacaaaaaaccgcgattggaagccaggagacggaaccaagaccctcgaacatcatacggatcgaccagaacctgctcgagaccaggctcgaccgcttggtcgccgaaaaggtcgccgagctattgaacgcgatgctcgacgcttcaggccgacgagatcgccaacgccgccaagtacgagcgcaccggggagcggaaggcgtacagggccggccactacgaccggagcctgaccgccaaggccggcaggctcgcgttgaaggtgcccaaactcaagggcgcggtcttcgagtccgcggtcatcgaacgataccggagacgcgaggagagtgtcgaggaggccctcatcgacatgtacctggccggcgtgagcacccggcaggtggacgacatcagccaattgctgtggggcgacaggatgccgtcccagaccctgagcgacaagctcaagaaggtgtacggggagatcgaggcgtggcgcacgaggccgttggaggacgagtacccgtacgtgttcatggacggcgtgtggcacaagcgttcatggggcggctcggtcgagaacgtcagtgtcctggtcgccatcggagtcaacgcggaggggcaccgcgaggtgatcggcgtggccgagggcatgaaggaggacagggacagctgggagcggttcgtccgctccatgatcgaacgcggcctgaagggcgtgcgcctggtggtcggcgaccggtgcgccggactcgtcgccacggtcggctcgatgctgcccaaggcgagataccagcggtgcatggcgcgtttcatgcgcaacgtgctctcgaagacgccgccgacacaccgcgaatgggcgtccgccgccctcaaggccatattcgccatggaatcccgggaatccgccctggccaaggccgaacaggtcgccacggagatggaatccaggaggctcaaggccgccgcgaactgcctgcgggagggcgtcggcgagacgacgacctacctgctggacgagttcccggacgggcaccgcaggaggatccgcacgaacaacatgatcgagcggttgaacagggagatccgccggcgcacgcgcgtggtgggcggcttccccgacgggaacagcgcgttgatgctcgtctgcgcccgcatccgtcacgtcaccgcgaacgaatggtcgacccgccgctatctcgacatgtcccggctcggtgacaacctcgtggaagcgaactgactatcgcgccatggacggccacgatccaaagtgcgcaacttttcgggcactaccaagatttgcgaaatcttagtatgaacaatgattaatcatgcgctttaccgcacctcatcacaccgcatatgcaaaagcgacgccgtacgcgagccggcaaaacagccgaatctcgtatggcgtcgctctcgtttgaggcagtggaatcacattatggtcttataggcgtgactccctcagatgttccactcggacgggttgtagaagtcgccgttgagggccttggcggccttctcctgcgcttcctcaagcgtgacgccggcgagttcggcacgcacgtcgtcgagcgcgaccggggtcatcgacagggagttgacgccgatgccggtgagcacgacggccagatccggatcggcggcggcctcgccgcacacacccaccggcatgccgttcgcgttgcccgcgtcggcgatcagcttgatcgcgcgcaacaccgccgggtgccatgcggtctggtagttggcgaccgagccgagtgtacggtcggcggccagcgtgtactgggtcaggtcgttcgtgccgatcgacacgaagtcggcgaccttggccacctgatcggccatgagggcgatggacggcacctcggccatcacaccgaccttcttcaggccgaaggacttgccgagcttgacgaagtaggcggcctcatgcgcgtcggcgaccatcggcgccatgacccacaggtcggcgtcggtctgggcatcggcggcggcaagcgccttgagctgcccctcaagcacgttcatgtgggtgcgcagcgtgcgcaggccacgcaggccaagcgcggggttcggctcgtcttcgggggtgaggaacggcagcggcttgtccgcgccggcgtccagcatgcggatgacgaccttcttgccggggaactgggcgagcagttcggcgtacgccttggtctgctcctcaacactcggcggttcggcgttgccgatgaacaggaactcggaacggaacaggccgacgccttccgcaccgtactccagcgcggtcttgccgtcggagggcttgccgacgttggcgagcagcgggatgtggtaaccgtccttggtggcgcccggcttgccgcgcagctccttggccttcgcggccttggccttcgcggcttcggcggcggcgacctgctcgtcgctcggctcggtggtgatggtgctttccgcggcgttgacgataaccgtctcgccgttcttcaggtcgccggcgccggcggcggacacgacggccacgatgccgcgggcacgggccagaatggccgtgtgcgaggtcgggccgccctgcgaggtgacgatggcgagggtcttgtccaggtcgaggccggcggtgtcggccggggacaggtcttccgcgaccagaacgaacggggtgtcggagaccgggacgcccggcgcgggaacgcccatcaggtcggcgatgacacgctggccgacgtcgtgcagatccgccgcacgctcgccctgatagccgccgatggccttgaacatctcttccacggcgccgaagccttccagcacggcgcgctcagcggtcttgccctgctcgatgagcgtgttgatgctctgcgcgagcgccgggtcggaggcgaacatggcgatggcctgcaggatcggagcggcctgcttggcgccttcgtcgccgttcgcggcctcttcggcacggcggttcagatccgcgttgaccagcgccagagacttggtcacgcgctcgatctcggattcggccgagacactgtcggcgcgaggcgcatcggacggttcgggaagcgcagctgccatacgaatgaccgggccgaccgcaacgccgcgtccgatgccaacacccttgataaccatatgttctccttatgttatggcctctcgccgcgaatgaccggtacttcccatccgcggaccgccttgttgacccaccaacttcatcgccggtaaatcattttctgtccacgccagtatacaccctcaaaagcgcgacacgactagaagtaaacgttttccagaaaattggaaaattatggtacactgttatgtcagcagccaaaaagaacggccgcccagcaattggcatagagtaatgttattgctaatcggtatcggcgcgggccaacacggcacacgcacgctgacgagtgtcgatatcgacgcacgacaaaccgcaccggaaccaccggcgcgacgacgcaaaggagtgtctccatggttacccgcgctaccaccatcaccgatcccgtcggcattcacgcccgtccggccgccaagttcgctcaggccgcgaccgcgtccggctgcaccgtgaccatcgccaagcagggcggcaaccccgttcccgccggctccatcctgtccatcatgggcctgggcatcaagcagggcgacaccgtcgaggtcaccgtagacggcgacaacgccgagaccgtcatcgacagcctcatcgagacgctcaccgcggccgagtaacctgcgcacgcattcgacggccgcccgcacgaaccgcgtgggcggccgtcagcgtattcccatccatcagatgcgcaccgacgcgcatcgcaagcatatggcggccgcccgccgtcataccgaacactgcgagccccatgaagagacagccatccgccgtaatggacgccataccggcatccaagccagacgcgacgcccgtcaacgacgacccggcgcccggcccggaacaacgcccacagccggcgaccagttccatcaccaacgtggccgccatggcccacgtctccatcgccacggtctcccgtgtgctctccggcaaacgcaccaaggacgacgacatcgcacggcgggtccgggccgccgccgaggaactcaactattcggtcaactatgcggcgagttcgctgcgcggcgccgccaccaacaccatcggactggtcatcccctcggcgaccgaccatttcagcgccggactgcttgatgagctggaaccggtcatcgacatggaaagacagcaactgctgctcggcatcggcaacgagcagcatacgcaggacgaacgcatcgaatcgctggtggctcgcaaggtcgacggcatcatcatcgttcctgccgcgggcgtcgatctggcccacacgcttgaccgcaccaccatgacgacgcccatcgtacaggtcggcggacggcagagatccttccgcacgtccatggtcggcatcgacgagaatgcggcgatggaaagcatcgtcgcgcacctcgccgagcagggcgtgcgttccgccgcctatctggccggcaaggaggtatcgttcgaatcggccgagatgttcgcgatgttccatacgcagatgcgcacgcaccggctcgtcaccgacacctcatggaaccgattcggcgattcgaccgtggagcgcggttatcagtgcgtgtggcgcatgttcgccgactcggatgcgcgaccgcccgaagcggtgatatgcgccgatgacatgatcgcgctgggcgcgatgatcgccttgcagacgctgggcatccgcgtgcccgacgatgtgcgcgtggtcggctacgccgactccccgcttgccttgacgacgatgccgacgctgacctcggtccgcccgccgttcctccagatcgtcaccgaggcgctgcgcctgatcgggcaggggcccgatcaggcggcgcacatctcgctgctgccccaattgattgtccggggctccaccgtcgtgcgttcctgaccaggtgccgtcatagcctccccggaatcagcgcgcagaacagcgcctcgaacaccagcatcgggttgccgttgcccagcaaccgcttcctggccacggcgatggcctccaaccgatcgactacttcctgacggctcagccgtgccgacagctcggcgatggccgtgcggttctccatgttgatcagcccgactgcgtcctcggcgttgttctgcagcaccgctatgtcgcggtagatgctggcggccgagttgagcgcgcggtcaagcacgtcgcggctccggcgcgtggcctgccgcttgatctcgtccttcttggcgatggcgttgtaggcgccgcgcagcttcggcgggatgcggtcctgctcaccgaggccgttgatgcggcggaaatccgcttcggcggcggccgtctgccggttcacgtcggcttccgcctggcttttggcggtgtcgatgagatcatcggccagcagcaccgcatccgatgccttgcgcagtcccagcagcccgacgatgagctcgtcccggtccgacatgacctgcgtgtcggaggcgtacagtttcgctatgccgatatgcccttcggcgagccgcgccgcgcgcaccgccacatgacggtcgaattggcgttccgccggcagcgccggattgacggatgccatcaggtaatccgcgaccgctttcatggacggcacggcaaggttgacgatgcgggtacgcgagcggatggtcggcagcacatcctgcgcgctgggggcgcacagcagccatatggtgtgcgggctgggctcctcgatctccttgagcagcacgttcgtggtgcgttccagcatgcggtcaacgtcttcgatgatgatgatccgccacggcgccgtgctgggcatctgttcggaggtgaggatcagctggcgcacgtcatcgatgccgatggtgaccttgttggtggccaacgtggtcacgtcgggatgggtgccggacagcacctgacgggttatattggtcggctcgtcggaaaggcccctgtcagggctttccagcgcggccgcgaacgcgcgcgcaacattcgagcggccggaaccgggcggtccgcagatcagccacgactgggccagcgtcttcgggtcgccggagacgatggcctgcagttggccgaccactgcctgctggccgacaatggagtcccatacgctcatcgcgcacctccagccggagtgttaccatcgctttccttagtgacggcagcctgagcggcagccgcctgcgccgcggcccgttcatccgccgcggcatcggccagcaccgcgtcaacgtccgccttgatgtgctcccatacggcctcgatcggccatgcggcgtcaatcacgcggaaacggcccggctcgtggcctgccagatcgaggaacgcctgcctggtgcgctgctggaattcgtcgcccgcggactccatgcgatccgcgtcatgctgcagacgccggtgcgccgccgtcgggtccatgtcgagcaggtacgtgcgcacgggcatcagcccgccggtcgcccacatgctcagcccgcggacgtcgtcggcggtcagttcacggcctcccgcctgataggcgagcgacgaatcaagataccggtcggtgatcaccacggctccgcgttccagcgccggacggaccacttcagccacgtgctgcgcccggtcggcggcgaagatcagcgcctccgcgcgcggtgcgatatcggtgccgtcggcttccgcggcgtctcccggctcacgcagcagcagctgacgcaagctgccgcccaatgccgtgccgcccggctcacgcgtcaccacgacctcgcggcctgcagcctccaagtagtcacgcaggcgctcgacctgcgtggtcttccctacgccgtcaacgccttcgaaagaaatgaacaattcagtcatatctacccccttgcccacagtgtacgcgatggcggcatgcgacgcggccaggccgccatcgcggcggctgcgacgtgactctactcgacggtcttcttcgctgcggtcttcctggccgtggtcttcttggcggccgtctttttcgcggcggccgtcttcttggtggcagatgccgtggagctcttcttcgcggcggtcttcttcgcggtggcgcccgtcgtcttgcgacgcccgcgcttggacgggccggcggcacgcttctcggccagcaggcggaacgcctcggccggctcgatggactcggccgtgtactgcttgggcacggtccggttcgtttcgccgtcggtgatgtaggcgccgtagaagccatccttgatggtcacgttcttgccggtttcgggatcggggccgagctcgcgcagcggcggcttcgcggtgccgcgtccacggccgcgtccgtatttcggctgggcgaacagttccttcgccttgtcgacgtccacggtgaagatctcatcctccgaggcgagagaccgcgtctcggacttgccgtcggctccggtcttggtcaggtaggggccgtaccggccgttgttcgcctcgaccgtgacctcgccaagttcgccggtctcggtgttggcctcctcgtaaacgcccacggtgcgcggcagcgacaacagtttcagcgcatcgtccagcgtgatcgattcggggctcatcgtcttgaacagggacgccatcttgggcttgggcacagtggtcttcttggacttcgtctcggatgacccgccgtccgtctcgagcggcaccaaggccacatacgggccgaaccggccgttgcgcacttcgaccgtgccgccgcttgccgggtcgacgcccagctcgcgcgggccaccggcattgctgtcgatgagctcatggccgacctgcacggtcagctcgtcgggcgccatggtgtcgggcagggaggcccgcttggggttgcccgccgcatccacgtggttcatgtcttcgagatacgggccgtaccgaccgacgcgcacgtgcagtccgtcgccgatgtcgatggtgttgatggcgcgggcgtcgatctcccccagctgcgcgacctgctgctgcaggcccgcgtgcgcttcgtccgccgaagtcgccacgtcgccgccggaaccgaaatagaaatgggtcagccagtcacggccggtctcctgaccgtgcgcgatctggtcgagcccgttctccatatccgcggtgaactggtaatcgacgtacttggggaatttcgtctccagcagcttgatgaccgagaacgccagccacgatggaatcagggcgcgaccgcgctcgtagacgtatccacggtcgatgatggtggagatgatgctcgcataggttgaaggacggccgatttccttggcttccagcgtcttcaccagcgacgcttcggtgtatcgcgccggcggctgggtctcgtgcccgtcagcctccaccgaggacgcggcgagacggccaccggtctgcatcggcggcagcgatccgttgtcgtcggtttcgcgcgaggcgcgtttcgccgcgccctcgccgtcaccggcacccatcgaggaggcagcgggggccgccgcacgacggccctccccggtggccttcatgaatccggggaactcgatcaccgtaccggacgcctggaacatcgcctcgccgtcctcgccggcaggagccgacagacgcacggtcgcggtggagccggtggcgtcggccatctgggaagcgagcgtgcgctgccagatcagcgtgtacagtttcagctggtcggcgggcaccttgccggagagctccgccgggtcatggaaccgcgcgccggcgggtcggatgcattcgtgggcctcctgcgcactagcggtcttcgtcacatactgcttggggccatcggacaggaacgactttccgaaatgatattcgacggcatcacgggcggcggcgatggcctcctgcgacaaggtcaccgaatcggttcgcatatacgtgatgtaaccgttctcgtacagcccctgcgcggcacgcatggtctgacgcgagctcatggacaggcggttgccggccgtctgctgcagcgtggatgtggtgaacggcgggagcgggcggcgacggtacggcttggtctccatcgatgccacggtgaaggtcgcgtcggccaggagcttggcgagggcgttcgcatgggcctcatccagctggcatacgttgtcagcgaaaccggacggcgtgagcttgccgtcatccgaaaaatccttggaacccgcaagtcgcttgcctccaagcgacaccatgcgcgattcgaacgacgccggctcgccctccgcgtccgtcgcgcccagcaccgcggtcacgtcccagtaggaggcgcgcacgaacgccatgcgctcgcgctcacgctcgacgatcaggcgtgtggcgacggactggacgcggccggccgacaatcccgggcccaccttgcgccacagcacaggcgacagctcgtagccatagaggcggtcgaggatgcggcgggtctcctgcgcgtccaccatgtcctcgtccacgttgcgggtgttgcccagcgacgccttgatggcgtccttggtgatctcgtggaacaccatgcgcttgacgggaaccttcggcttgagcgtctgcaccaggtgccaggcgatcgcctccccttcgcgatcctcatcagtggcgaggtagagctcgtcggagttcttcagcgcttttttcagttcggcgacggtcttcttcttgtcaccgtcgacgatgtagtacggtttgaagccatcgtcgacgtccacgccgaacttgccgaacctggccttgtcgtccgcgggaatctgactgggctgtgcaaggtcacggatgtgaccgaccgatgccatgacggtgtagccgctgccaagatacccaccgattttcttcgctttggtgggagactccacgatgacaagcttgttgccggtgcccattgtctctccttacctacaatgtcattggccttcatcatactcacgcggcatggtcaaacggcaaatcgcgcggctccgcggcggtcaccgcttcttcttcggcggggccggcggcgcccccaccaggccggctcggctcaacggggacgccgtgatctggcgcatcgccagcagcatcccgaacaccagcgacgaaacgccggctatcatcgcgaaggtggagacgtgggcgccgacgctcgcccagctcgcgctcaggctcagaccgggctcaatctgccacatgatgtatgcggcatagcagcagcacagcacacccgccgtgatcatcaccgtgccgacgatctgcacgctcggcgaggacgcgcgtttgccgggcgcgtccatgccggacgtgcgcgtgaatgccatcgccagcagcgcgaagccgcccgccagcagcaggctcatcaccacgtcgaccgggcggtgccatgcccccgcgatcaccgacaggccgatgaccagcgcataggcggccccgaccagcgccatccacgcacggcatccgcgcggaaccgcgaacagcagcagcacgcccgcgacgacggccagcatcgtatgaccggaaggcgcggaattggcgggctgagacacggtgttgatgatgaacggccgcggcagcacacctttaagatatgtggacgcgaaacacagcgcggcgaacaccgcggactgcccgaccagccaccaacgcttgcgtaccagcatcaccaccgccgcgacaacgatcagcagcgcggagacgattacggtgaagttcaacggatgcccggcgattgacgtgatattgcggctgatgaacggggcgaccagagcggacgcccacgacggcaggctgtcgtggaagccgctgaacaccatatcctcgtatgattgcccgtcctcggtgcgcacggcgatccaccatgcgccgaacgagatcgcgatcatcagcacgccgaacaccgcacacagcacacggctcgacacgcgcggacgcacggtcagcgggtcgcgacgcgccaatccgcgctcgatgtccgcctcgtcgtcaatgtccgccgcgtgttcgtcgggtgcggcggccttgcgtttgcgcgcggccggcgcgggcgatccgagggcgcgcagcggatgatccgcgatcgtctccaaagcggaccatgcgctggccggggacgcctgcggcaccacgggttctggctcctgtttcgccgacgagcgcgcctgttctggtgcggggtctgatgccgacgcgccggatgacgtcgtatccgatgcggctgcggtatccggctcattcggcgtgtcagcaggcgcatcggtcgtctccgtggacggcaggcgttccgccgacgttgccgcatcagcccggtcgccgctgacctgcacggcgtcaggcggaatcgcaccgtcacgcgagatttcggcgggatcatcaacacgctgttcttcactcatagttcaagactgtagagcctgtacatgtgtcagtcgcctcatcgcgcccatattccgacagaataatcgaaaacctggccccggcatatcaaaatacgggttgaaatcgccgaaatctactattccccgtgtgaaatcgccgtttcaaggtccaaaaacggcgatttcgcacggggaattgccaagaacggcgatttcaacctgtaatttaagcctcacggcgccgcgacggtcagggtgaggggccaagaaaagaaaaagaaaaccttcacgtacccgacagaggccacttacccttgctgcattcctgccctggggggattgggtgacataacgccacgtgaaggctgtactagtatacatcacccccggatatcgggtgcgcaacgacaataatgcccctccccgcgctcgcgggaaagggcattatcggctatgggagactagcgacgcaccacgtcacgccggcgaatgatcaccagcgtggccccggcggcgagcagcagcatgactacgcccgagatgccagtgacagcggcacccgtcttggcgacgccggcattgctgccgttctggccactgttggcgcccgacgcaccgggcttcgccggggcgccaggctggctcggcttgccgggcttcgtcggcgtgccggccttcttcaccaaagcctcttcggccttgaacagagcgccggtcgcgttgttgatctcttcctgagtcgcgttgtcgttggcgagcaccgccttggcggcatcaagcgccttgacgaacgcagcccacgaatccgccgtgtagtcggattccttcagcttggccgcagcatccaccgccgccttcagcttgtccttagacggcttggcggtcgcgttgacgagcccgttgatggcggttcgcaacgccgtgtaggcgtcgttgacctgctgctgcgtggccgtgtcggagtcgagcaccttcttcgccgcgtcgaaggccttcttgaatgcggcccacgaatccgccgtgtagttggattcctggtacttgctagcggcaaagaccagagtctccagcagcgccttgtcgatgttcttcacggtgtgcgcgtcgatgacgggctcatcgctctcgatgttcgggaagaagccgttcttgtgcagcgccagcaccttcggagtggtctcggacgaatcatccgcggtgtggacggcgaccttcgtgccgttctcgtcggggaagctgaccgtgccgttgccttcggtggcggagtcgccgaaccacagggcagggtggtacgcgtcgaacgagtcgtccttggaaccgcccgcagtgtcgacgatgtactgatccttcgcgccggcagcgtaaatcgactcgatctgtgccatgtaggcgatcggggcgaccttggtgtccttggtgaatccaagggcggacagcttcacggagagcacgacctggttggagtcggagacatatgcggggtcgatgggctcctcgtcaacgaccttgccggttgtcgcggaagtcgtcgtggcccatgcggtgtcgtactgcgcgttgccttcggtggtgctcaccgagatcatgtagtcggccttcatgtcgccgtccacgtcgaagatcacgtccggaatgaaattgttgcccaagtgggaccacgtcttgtcggtgatgatgccgaagctcagcaggccctgcgacggatcggagagctgaggtgcggtgctggaataaccgatcgcgcggatgtcacctgcggcaaggctgcgagcggcgtcaccgttgccggtgtagccgtcgaccggatcctcggcaccgtacacgaacgggacgagctcggagtggtagccggtggcggtgtcgccctggtcaaggccatggccggacacggacagcatgcccttcttgttgttgaagccgctcagttccgtggtggtttcggagattgccttcggcaccgaagtgacgggcacacgcagcgtggtggcgtcatcctcctgggtgaccggagtcgcggtgatgatgccgctggcgtcggtcacgtactggcggtccttgcctgcgacctgcgcggactgcgtggcgtcacgggtgcgggtcagcttggactggtcgatgctgatcttcacgcggaagctggtgctggtcccggacttggcgaccacggtgtccccaccgttgtcgccgctcaccgagtacgtgacgcccggcaccggggtgcgggccgagtatgtgagcttgtacgtaatgtcatgatcggtgttgttcacgagccgcatggtctgcttgtcggtgtagccgtccttgccgaccgggatgacgccgaactgcgcggtgatggcctcgttatcctctccggcaagctgcacgttgttgttcactgcggcgagcgcgtcgatacgaccggagcccacacgcagcgggccgtacgcggtcttgcgatccgcggtgagcacgtcgtggttggcggtgttcatcagctgggccttgaccacgttggccaggtattcgggccgggcctgacggaccagcgcggcgacgccggaggtcaacggggtggccatggacgtaccgctcatgatctcgtcgctgttgccggtgccggccgaagcggacacgatgcccacgccgggagcggagacatcgggcttggcggtgccgtcataggagccgtggatgccacgggaggtgaaggacgcgatggtgtcttcgctctcgctggagtagtcggcgtccttgctcatacgcagcttggtggacagggtcaccgtcagcgtgccgtcatcgatggcgctctgcaggtccttgttctcggcggcgttcttgaccagctggaagccggggatgccggcgttgccgccgatgccggactcggggatgttcgcctgcgagccgaacaggatgccggtcgcgccggccttctcggcgttgtcgaagcgggtcttggagccgcagttcacagcggcgtcgttccattcaacgtaggcgatgttgcccttgacggcagcggcgtcatcggcggagtatgccttgcagccttccaggttgtccttgtccttgacgcgcacgaccttgccggtcagggagaagtcgtcgagcttcgcgtagttcacggagtactggccggcgagggtctggcccttgagcgaggccgggccgtcggtcacttcgacggcgtcctgcagcgccttgccggactggctcgcggccacggtcagcgcgctcttggcggtgccgggggcacccatgatgtcggtgatgtcgccgtcgttgccggccgcgatcacggacagcacgttgtctgcggtgaggttatccacggccacgttctccgggtcgtcggaggcgccgaaactgccgccgagcgacatggagacgatgctgatgcggctggactcgtcgccgttgacttccgcctcggtgttgtgcttggcgatgccgtcaagcgcttcgagcaccaggtcggtggtgccgccgttgtcgccgaacaccttgtacgagtagatgccggcctcgggagcggcgccggggccaatcttccagctggcgatgtcgccggcggtcagcttctggtagcctgcggtatcggtcttgcccgaggtgccgtcggccttgacgccgtagcccagcgcggtgccggcgacgtgcgtgccgtggtggccgccctggccgtcgatcgggttggcgtccggggtgggattgttgttgccggcgttcgggttatacgtggcgccggcgtaatcgtaaccgcccttgaacttcgtcttgtcgagcagattgctgaccttcgggtcggtcagcgggtcggcggtggagttcagcgcggtctggtaggcctcggtggtgcctgcgcccccgaagtcggcgtgcgtgtagtcgaggccggtgtcgacgactgcgatgttcacgcccttgccggtcttgccggtctgttcccaagtcttgacggcgttgaccagctggtcgttgttcttgttcgcgggggcttcgccactgccgttggtcgtgtcgagcgccttcttgggcgtcaggatcgtgatgtgcgccaccgagccggactgctcggcgagcttgcgcagcgacgccgcgtcggcgcgaacggctacgccggacagcgcatacgaggtggagtagatcttcttggcgctggagtccagcgactgcagctgcgagaacacgttcaccgaggtcttctcggcggtcttcgcgctctgcgtggccgcctgggccgactgcgcgcgctgcttcagcgtgggcagcgcggaacgctgcctgctgaagttcttgagcacactgttcttgcgttccagcgcggaggggctggtggtctggatgaatgcggtgacctcgcccttcgcctgctgaagctgggatgagaccttgctcttcagattgccggtcgacagagtcggcgtcgtggacgccgcgtcaccttgtgccggagccgcgagcgcggtaccgggcaggctgcctgccatcgccagggcagctacagcggcaacccagcgaggccattgcttattggccattattgttttcctctctttgcgtgcgtcactcacgacgacactgtgaaagaaactagacctggcgctcgtccgatatcgttacgttttgtcgcatcgcgtaacatttcaggaacatattgttaacactcacctcacaatgccatatacgccgactctcacgtaccgcgcatgacgcacgccatcgtcagacaggcagacctccatcagaccgcgcttttcagcccctcccatgcggccacagcatattcgaccggcatccattacggcagtcgagcacgtacttccggatcccgacgcatccacgatccgcttatgcccggctataagaaaaaactatgaaaatcttcagctgacggtcaatatatgatacacacgaaccgccatgctgccttcggcggcccggacggcattcgattcaccaccagagaagcattgtcagcgaaccatcagcgacctacactaagttacggtagcgtaagttagtgtaggccgggcattccggccgcagcgaggtgatgatgatgagcgcgtcaatcagtgcaccatccatacgcaagtccgcggcgcagcgaaaaacagcgcggcgacagaccgcgggcggcgggatgcgggcggccgccacagcgcagaccgcaaccgctgccggcatggccgcgacgcagaccggtgcctcggccaccgcgatgaaccgcgccctcgagcagtatcgcgccgcgcgcgcacgctatcgccaagccaaggccgcactgaaagccgccgaacgccaggtcacgccggtcgatgcattcggcaaccgcaagcctcggctgcgcggctggcagcacctcatcaccctgccgttgtgcatcgccgcatccatcgtgctgatctgcatcgcgccggccggaccggtcaaggccgcgtgcgcgatttacggcgcgtcggcgatactgctgttcggcaacagcgccctgctgcacgtcgtaccgtggcgcagcgccaaggtgacgcgcgtgctgtgcggcatcgactactccaacatcttcctgatcatcgccggcaccaatacgccggtgctgttcgcgctcagcccttcgatccgatggccgtacctgacggtgatatgggcggcggcgctcgtcggcacggtgatgcatatcgtatggctgcgagcgccgaactgggtgttcaccgtcgtgtacgtggtgctggggctggcgccggtcacactgcttccggcgctgtggaccgcgcccgcggtgggtccggcggcgaccgtgctgattgcgtgcggcggggccgcctacattgcgggcgccacatgcttcgcgatccgcaaacccaatccgattccgggctggttcgagtttcacgaggtgtttcacatgggcacggtcatcgggtacacctgccacgtggtggccatatatctggtcgtgtgcgcgctgtaaaagacgccggacatgccgtcaccgaacgttcatcaaatcgttcacagggatggttgcgcggtcgataatgtgcggtatccttggtcgagctgagaacgaaacgcacatgacggccgttcatattcgacgcggggaacagcgcgaatcatcaaatggaagggtcgcggcgcaaccggcaccgccggcgcgggccgcaacggaaggaagctatgaacgcggatttggtgatcgtcggcgcgggcctgttcggcctgaccatcgcacagcaggcggcggagcgcgcgggcgcccgggtcgagatcatcgatgtgcgcagccacatcggcggcaacgtgtacagctatatcgacgaggagaccggtgccgaaatccaccaatacggtgcccacctgttccatacttccaccaaacgcgtttgggattacgtcaaccgcttcaccgcattcaccgactacgtgcatcgcgtgtacgccacgcacgacggcgaggtctacccgctgccaatcaatctcggcaccatcaaccagttcttccgggcggcctacacgcccgccgaggcgaggcagctcatcgccgaacaggccggtgaactggccggcaccgacccgacaaacctcaacgacaagggcatccagctgatcggacggccgctgtatgaggcgttcatcaagaactacaccgccaagcaatggcagaccgatccggccgaactgccggcgagcatcatcaagcggctgcccgtgcggttcaactacgacaaccgctacttcaaagacacatgggagggactgccgcgcgacggctacaccgcgtggatggagcgcatgatcgatgacccgcgcatccatgtgacgctcggcaccgacttcttcgacgagagccagccgctcaacaagaaggcgctgcgcgccgccggcacgcccgtggtctacaccgggccgattgaccggtatttcggctatgaactcggcgacctgaaatggcgcacggtggacttcaaggaagtgcgctacgacgaggacgaccacttcggctgcccggtgatgaacttctccgacgcggacgtgccctacacccgcgccatcgagttcaagaacttcaacccggagaggcgtgacgcacagaaccacaacaggacagtggtgtgggaggaatactcccgcttcgccgagcgcggcgacgaaccgtactacccgatcaacacggacgccgacaaggcgctctatgagcggtacgcagccagggcagccgccgagccgaacgtcgtgttcggcgggcgcctgggcacctacaagtactacgacatgcacaacgtgatcgacgccgccctcaccgcatatgaggagcaggtcgcgccgatgctgcgcgcccggtgacaccgactggcgggcacttccgccgccgccttttctcatttcatccggatctcccgcccatctcatccggccacagtctcatgcgctcaccggaaagtgggactatgaccggatgaggcaacgccgcaccgctttggccgggcccaaaccagcgaagcattcatacaatcccacaatgcagaatccgactcacattaaggacggtcatgaccgtcaccgtgcgagggtatcgtcaccgtgtgagccctcgcacagtgacgcatccggctaaaacccttattttccaacgtttctcacgataccgtcacgccgagaggctatggttgtggttttgctagatatggacaagcaccaagcacgatatcgacgtttgtaaggattcagaggaaaaccggtgaggaaagcgcgaaaatacgcgcaaaccggttcgcatcatattgcaaggactacggtagaatcatggcttcacatacgcgcactgttaattccagttcaggccgacgcgcggcaggaacgtccggtcgtcgggcggccggcgcctcaggccgcaccgcgaccggcacccaagcgggtgcggcgacgggcacgagaaccggcggcaccgccgcaaccaacggttacagcgcgcagcgcaacagcggctcaaggcgtggccgcggcgctaatccgcccgaaggcacacaccgcggcggcggcacccaccgctcccccggctcgaaaggcccgaaagccaaagggcgcaagaagcatctgattctcaagtggacgctcggcatcatcggcctgttcctcgccgtcggcatcggcgcgttcgcctacctgtacgccaccatcgaaatcccccagccggagaccatcgcgctggccgagaaaaccagcgtgtactatgcggacggcaaaacgaaaatcggcacgttcgccgagcagaaccgtgagatcatcgactgctccgtactgccgaaatacgtgggccaagccgtggtcgcctccgaaaaccgcacgttctacacggaccgcggcatcgacctcaagggcatcgcacgggcgctgatcaacaacgtcaccaagggcacccgccagggcggatccaccatcacccagcagtacgcggaacggtattacctcggcgagaccaccacctacatgggcaagctcaaggaagccatactggcggtcaagatcgcgcagacgcaagacaaagacaccgtcctgtgcaactatctcaacaccatctatctcggccgcagcgcctacggcatccaggccgccgcccaggcgtacttcggcaaggacgcgaaagacctgactgtgcccgaggcggcgatgctcgccggcatcatcccgtcccccagcaactgggatccggccgtcaacgccaagcaggcgaaatcgcgattcgagcgcgtcatcaacatcatgaaagaggacggctacatcaccgccaaacaggccagtgaagccacgatgccgaaaaccgtcaccaacgcacagcagaacatctacgagggccccaacgggtatctgctgcagatggtccgcagcgaactcatcaactcaaaggcgttcacgcaagacgacctcgacaccggcggctacaccatcgtcaccaccatcgacaaatccaaacaggatctgatgtatcagaccgcgagccccaccaagggcaacgcgggcatgccggacggcgtacagaccggcggcctgtcggtcaacgtcaaagacggttcaatcatctcactgtacgcgggcgaggattacctgaagaaacagctcaacaacgtcaccgacgcgacctacgaagtcggttccacgatgaaaccgttcacgctgctttcgaccgtccagacgggcgtcagcctcgatactgtgttcaacggcaactcgccgcgcagcttccccgggctgaaacagccgatgtcgaactcgggcggcgctagctacggctacatcaacctgtacaaggcgacggcgaactccgtcaacacggtgtacatggatctgcagcagcatctcggcgcggacacgataatcaagaccgcgcacacggccggcatcaaaggcaagatcaccgatgacggctacgtgacgctcggcaactccggtctgagcatgatcgacatggcgcgcggcttctccaccatcgccaaccagggcaagaagccgacgctgcacatcgtcgccagcgtgaagagcagcaaggggccggaactgtacaaggcgccatccaccgcggagcaggtgttcgacgcgaacgacaccggactggtggtcaaggcgatggaaggcaccatccaatacggtaccggtcgtgcggcgagcgcgatcggcaagacgatggcaggcaagtccggcacggcaaacgacaacaaggccgtgagcttcatcgggttcacgccctcgacgctcaccatgttcgccatctggaatcccggagcgaacggcgaggcgctggaactgccgaccatcaacgggtattacaagggcatgggatatccggccgtgctgttcaccaactacatgtcgagggcgctggagaacgtggcggacgagaagttccccgacgtgaccgacagcggcaagatcggtggacccgatggcacgtggggcaccggttcgcagtactcgtcttggggcaacagcggccagtcgcagagcgggaattcgcagggcggcagcaggagcgacgaccagtcgtcgcagagcggcacgcagtctggcgacgggtcgggctcgcagtcgacgaagccgcagaccggcaacggttcgaatggcagcggcaatggatcgggcggcaacgggtccgatggcaatggcgggaatggcggcaacaacgggaataacggcaacggagggaacaacggcaacaatggcggaggctcggattgcgcgaccgatcccaccgccgccggctgctccaccggcaatgaatccaacaccaacggcatagcgtcgcagtgagggacgaggccggattcgcggttattggcgtgcgttgaccatccccgccggcgggggcacgagagctaggccccgtgcgactggaggtggttccggcctctcacgaccatcaaaaaagggtggctgcaggacgaatcctgcagccaccctttcgtttaccgcgaaatatcagcgctgcgaacggttgatcgcggagatgatcgccttgagcgcgctggtggtaatcgaggagtcgatgccgacgccccagatgatctgggtctcagtgtcctcgcccacctggcattccacgtaggacgcggccatggcgtcggtaccgacggacatggtgtgctccacgtaatccatcacggacgcctcaatgccgaggttggaaaccgcgttgaggaacgccgcaatcgggccgttgccgatgccggagatctcacgctcgtgaggttcgtccacgcccacattcacgccgcggtcgagcacacgcgccttgagcacggtgtctgaaccatcctcgccggaactgacggccaccttgagcagtttgaggcggccccacggagcgagcgtcgcgtcatgcgtatcgccgacgaccacgccggcggccgtcatgccggactgctccaccggcaggtactcgtccttgaagagacgccagatgtcctcgtccttgacttccttcttggtcgtgtcggcgaagttctgcacgatcttgtcgaactccacctgcagacgcttcggcaggtcgaggttgtggttggtcttgagcaggtaggccatgccgcccttgccggactgcgagttgacgcggatgatcgcctcgtaggtgcggccgatgtccttcgggtcgatcggcaggtacggcacgagccacacgaacttgtcgagatcggcgccgactcggtccgcagcgacctcgcgggcttcgaggcccttcttgatggcgtcctgatgggagccggagaacgcggtgaacacgaagttgcccgcgtacggatgacgctcggagatcttgatctggttgcagtactcgacggtcttgcggatctcgggaacgttcgaatagtcgatctgcggatcaatgccctgcgtgagcatgttcagacccagcgtgaccagatccacgttgccggtgcgctcgccgttgcccagcaggcagccctccacgcggtcggcgccggccagcacggccagctcggtggcggccacgcccatgccttcgtcgttgtgcgggtgcagggagagcaccacggcgtcacggtcgtcaagatgcgtggacacgtactccacctcatcggcgaacacgttcggcgtggtcatctcgaccgtggccggcaggttgatgatcatcgggtgctcgggggtcggcttgatgacgccgatgaccgcattgcacacctcgaccgcgtattccggctcagtaccggtgaacgattcggggctgtactcgtaatacaggtcgatgcccttggcctcgttttcaaggtccttgcacagctcggccgcgtcggtggcgagcttcttgatctcttccttgttcttgcggaacacgacctcgcgctgcagcacggagaccgagttgtagaagtgcacaatcgcacgcttggcgcccttgagcgcctcgtaagtgcggcgaatcaggtgctcacgacactgggtgagcacgacgatggtcacgtcgtcggggatgagctcgcgttcaataagcatgcggatgaagtcgaaatccgtctccgaggcggacgggaagcccacttcgatttccttgaatcccatggagacgagcaggttccagaagcgcagcttgcgctcggagtccatcgggttgacgagcgcctggttgccgtcgcgaaggtcgacggagcaccagcgcggggcacgctgcagacgcttgcccggccacgtgcgctcgggatagtcgaacggcacctgcttgtcgtaggcgacgtacttggtgtaaggcatatcgctcggcttctgcggctcgccgatgaatcgtgcgggaggcagcagcgggtcgttgttccccccattggacgccgcggcgaccgccgcaagatcaaacactgatgattgatcctgacccatatctcctcctttacttgatgatgccggcgcctgttgcctgccggccgtatgttgtcgtcgcacgataggtcatgcaatcaatcagtctagcgtgaagcgccccggtaaaccgccgagatatcaagaatgcggccaatccatgcggccttcggagcgttatctcgcttccgagggggtgatttcaggcccgccgaacatctatctgcgtttcaaggggttggcgttgctcgatattcgaggtattgcatgatggacgccactggaatcatgcggctcccatgccattgatactcggccaccaacccctcgaaatgcagatagatgttccggagcgtccgagtcaccccctcgaaacgtagataccctgccgagataacgtttcggcccctctccggacgcccgttgactgcatggcgacgcccgctccacgcgtggtggcgacttcgcgaagagtatggcgccgcacagggcgactcgctacagtggagggcatgacactgcgttttcacgacgacggcacgttccgcgtgctgcaaatggccgacattcaggacggcccggaagtcaaccgcgacacgatccgcatgatcgaggccgcaatcaacgaggcgaagccggatttggtggtgttcaccggcgatcaaatccgcgggtacgatcccgcgtacatcgacacgttcctgcgccggcgcggcgagaaccccggcgcacgcgtacgtctcgtcaccgaaatcgaggcgaagctacacggcatccacaggcgcatcgcggcgcggcgcgatccggacctgccaccgcaggacgatgtggtcacgatggacgacctgatgaacgacacccggcagaaagtgcgcgacacgttcggcgcgttcctcggaccggtcatcaacgcgggcgtgccgttcgccgcgacctatggcaatcacgacttccagtgcggcatcctgcctgacgagcaggacgacatctaccgcgagttccccggctgcctgaatcccgaggccgatgctgccggcggctcgccgttggccatcgagccgggcacattcgcgctgcccgtgctgtcctccgacggttcggagcatgtggcgatgggcgtgatgctggtcaattccggcgattatgcgggcaagccggaggagaatgacgcccagtacccgcggtatgtggcgcattcgcgcggactcgacctagcggattcggacggctacggcacaccgagcgctgaggcgatcgcatggctgggcgacgtgcagcgcacgctcgccgagcgcaacggcgatggcgaaccggtgccgtcgatcacgttccagcatattccgccgcaggaattctatgactgcctgaccgaggtcccggcatggacgccgaacgccgtggagggcgcccgcaattacgccgggcgctgctacgtgctcaacgacgccgtatgccggccggggtcacggctcggcgaggcgatcggctgcgctgacgagaacgtcggcgaggtggacgcattgcgcgaggcgggcggctatttcgcgttgtactgcgggcacgatcacaagaactcgttcgtcgggcacgtgcatgacctcgatctagggtatgcgccgacgtgcggcttcgaatgctacggtccgaagtctcgcctgcgcggcatccgcctgttcgagttccgcgaagacgacccggccgcgtatgagacccgcatgctcacgtggggcgacctggtcggccgttacagcggcaatgagttgcgcgtgttcttcgaggatcattgcgtgacgggcgccgcgaccctgcgcaacgaactgcgccggccgcaggtgtttgccaccatcgccctgaccctatccgccggcttcgcggcaatcgcgcgctccatcgcacggcgtctgcgacgatagcgcagcggcggcaaacagacgacaaagggcatggttccggcggcgatatcgtcgacaccatgcctattcatatccgccgtatatccacccggctcgtccccgggccggccctacctctactcggtcaggtacagcacgttctcgtcaaggggggaacgacgttcatgtggtacccctccattttcaggaacggcttggagctgtcaggcttggcatggcctgacacgtcggcaactggtagctcgcgccggccagtccctccagtttgtcgctgctgatgccggctggcacatagcagaatttgaatcctttcttgccgccgcagcgatagtcgctatccggccccatgagctcgatgccgacgtccgacggcaccttccaccaaccgtcaccacccgtgtccgtccggcgtgcagcgtgaccgactgcggatcatcggggctcagcatgagcttgcccgagccaaccgaggtggccttgcccttgtcgtccaacgtcaggcaccaactgtcgtctttcaggcagtatttgcctgctatcggctagaaatcgcctttgccgagtgcggtgcgaacatccgtcaggctcatgtccttggtgggcttggccgatgatgcaccgccgtccgcgccggcgctgccgcccggctacttgacatcggcgtcgggcagctcaccccaatccaggtcgatggagacggtcagatagtacacggtgtcgtcgctgggagcgggcttcatcttgacgatgtcgcttttgctgccgacgtagccgttgtacggcatgaacgggttggcggagttattggtcatgtccgccgtggtcttgtcgtagagcttcgggtcacggtagatcaggaacggcttggtcgtgttcacggctttctgcttcttggccgcggccagcgcgtccgcgtcaaagtacccgtcgctttcgagcttgttcaggtccgcgccgaccggcacgaccagatagaagtcctgcatgtgatacgtcgcgccggagatattgttgtaatcgccgttttcgaccatcttgccgttgttgcagacgatgccgcctgccgtattcgagtcttcctggctggtgccgcaccagtagttcgtcatactggatcgcgggaacagttcgaacgcgccggtgtcaccggtgagtagatagtcggctttcgggctggagcagtacggctgctggatggcatcgcaggagctcagcgactcgtattcgccgtattcggtaccgtcgcgacctttcggataggggatgtacgagttgccttcgctgccatcgccgccatccttgaacgtgatgcagtcaccggagttgttgcaccacgttcccgcggccacaccggagacaccgagcagattgtcgccgccggtctccggggaatcgtgaaccgtgtaggcgtccttgacgccgctggcgtcgatgccgtaatacagcgtgaccgcatcgccttccgctaccgtggatccgggcatcgggtcggaaccggacactttgccgacgaacttcttcgaggcgaggcgcggcacgagcgtcacgtcatgtccttggctttccagttcggatttcaccgtgtcgacgtcccggccgacgatgtcgatgctgatggcgccgccgtcgctcttcgtggcgacgccgatgtagatgccgtcgtccttgtcgccgtccgacagcgcctgtccttcggcggggtaggtcgccaccacggaaccgattggcttcttcttggtgtcggacaccggtacctgcttgtaatgtaccggcacacccatcgtcttgaacgtggatacgaccttcgtggcctgcttgcccatcgtgttcttgggcacaccggggccacccgactcctggacgattaccgcggcatccttctggacgcggtcgccgggcttcatgccctcgtatccaaggaacacgcccttcttcttgccggagaagatgatcgacttcgatgccttcacgcccttggctttcagctgggtgaccacgtcatcggcggtggcttcgccgccggacgcaccggagatctcttcggcggtaggcagcggggttccgccccagatgcccgcgcgatacgtgaagaacagggcaagaccgacacccaacgcgagggcgaccaccacggccacgatgaggccgatgagcttgcccctggatttgggcttcggcgtttgccctggcacggccggcgtcgccgctgacggctgggttgcgggcgcggccggagtcgagactccggcacctgacggctgggcgaactgctgggcttgcggccacgccggttgggtaacaggctgctgcggctgaggttgggactgagccggctgcaaaggctgtgttggctggagcggctcctgaggtgcagcaggagccggcgcgaatccgccgcctggcagtggtacagctggagtcgccggctgttgcgccgcagagggctggggcatctgcgacactgcgggctgcgacgccggcgcggcctgtgatacctgttgttgcagcggctgcccgcagttcccacagaatttgctgtccgggctttcgtcattcccgcaatatgggcacttcatgcgtgtccgcctttctcccccgcccaatggcgtctctcatcattgcccgccggcgcgaaagcgctcgcgaacacaccaagaacatcataaaaccgggcgtcgtacaacacagtgtcacatatcaggaaacaccaagcatccatcggtcacgcccagatgcgtcactgtgcggcggcccagcgaaggcgacagacaagcgctccagcgaaattcagtggaacagactcacgccgcgccgggccatgcagtaggcgttacccagccacgtgtgccgcgagttcggccacacggcccccagacgcggcgcgttctggctcatccagatgctgggcacgcgcccgtcggcgctgcgagagccgagcaggttgaacccgttcttgatctcaagccaatcggggtgctgcgtagcaatggcaagaccctcttcaagggtcagtggcgtgcgctcgtcggaatcgatgagcttgcgcgccacgtccggctcgcgattgatgtagcaggtgccggtatgcggctcgacaaccagatagaacggcccttccggcggctcgaacccgtcctgcggcaggaagcttgcgatgtcgcgcggaggcattgtcgtgaaaccggccatgcggttgatgctggttcgggcgatcagcgactcaggcgacaccagctcgcgcgtggggatcagcaggatgttcgagcccagatcggtatgctccaacgcatggatcagcggccgtgcgagcgcgcggaacgcggcggcgctcatgtccgccacgtctgggtaacccagcgccacgatacgatccagctgcttctgcgcttcctgcgatgctattgacatgcttccagagtaccgcgaatcccggccgcagcacccacccatcggcgaacacggccatcattcgggaaagcggcccgtcttgttccgcgcattccgtaccattggataggtgcggccatgtcactgcggccgcttgtataggaaaccgaatcaaacccagaggttgttatgtccgaaaagttgaaggtcggcattcttggcgccacaggtatggtcggccagcgttttgtgacgctgctggagaaccacccgtggtttgaggtggtcaaactcgccgcgtccgcgcacagtgcgggaaagacctatgaagaagccgtcggcccccgctggaagatggaaacgccgatgcccgagtacgtcaagggcatgacggtgcatgacgtcgccgatgtggccggcatggccgatggcgtcgatttcgttttctccgcggtgaacatgtcgaaggacgagattcgcgcaatcgaagaggagtacgcgaagaccgagaccccggtcgtctccaacaacagcgcccaccgttggacgccggatgtgccgatggtcgtgccggagatcaacccggagcatttcgcggtgattgagcaccagcgcaagcggctcggcaccacgcgcggcttcatcgccgtcaagccgaactgctcgatccaggcgtacacgccggcgctggccgcgtggaaggaattcgagccgcgcgaggtcgtcgtcagcacgtatcaggcgatttccggcgcgggcaagaccttcaaggactggcctgagatggtgggcaacatcatcccgttcatctccggcgaggaggcgaagagcgagaaggaaccgctcaaggtgttcggtcacgtggatgccggcaagggcgagatcgtgccgttcgacggcggtctcaagatcacttcgcagtgcatccgcgtgcccgtgctcaacggccacaccgccacggtattcctgaacttcggcaagaaggccaccaaggaagagctcgtcgaccgcttggtgaactacacgtccaaggcgtccgagctggggctgccgcacgcgccgaagcacttcatccaatacctcaccgaggatgaccgcccgcaggtcaagttcgatgtggactacgagggcggcatgggcgtgtcaatcggccgtctgcgcgaggattcgatctttgactggaagttcgtggggctggctcacaacacgttgcgcggtgccgccggcggcgcgctcgaatgcgccgaaatgctcaaggcgctcggttatatcagcgcgaagtgacggcagcctgccgctgagactgaaattgcggctggagaccatcgaacggccgggttgaccacggattgattccgcagtcaacccggccgttcggcatatcgggtgtcgtcaccgacgcaggtgacgtgcattgccgcgcggattacggcggaatcgtaccgtaacgatcacggcgactatgaccatggcgagcagcagcagtgtggcggcgaccgtcgctgccacaaggagccgcataattccgttggaacgttccatgtgctcctccttcggctcaggagcgcgaatgaatacggaaggaggaggtaagaacgctcaaaccagataaattgaccacccagccggctcctgctgtcggagatattccgcgtagcgggcggggtggtcaattacgcgattgcgtcaaaaatcagcgaccggtgccgccgtagaccacggcttcgacctgatcggcgtcgaggccgtaggcggtgtgcagcgcgcgcacggcgtcgtcaagctggtcgagcgggacgagcgccgcgatgcggatctcggatgtggagatcatcagcacgttgatgcccttgtcgctcagagcggtgaagaacttggccgccaggccggaatgggtcttcatgccaacgcccacgaccgcgaccttgccgacgctcctgttgatgtcgaacgacttgtagcccagctcgtcatgcttgtcgatcagcacgttctcgacttccttgacggtggattccggcacggtgaaggagatctccgcggtgcccacggacgcgccggcctgcacgatcatgtccacattcacaccggccgtcgccagctcggtgaacactttcgccgccatgccgggctcgttcggaacgccgcgcacggtggccagcgcttcgctgcggtcgtgcgccacaccggagatgaccggggcttccgggccgaggtcggggaacaggtcacccatggatttgctgttgttgtcgctcatgttttttcgcctttatatttgtgtgaacggtaaatcaggtctcgaatatgtcgtatgtcagtggacgacatcagtcgatgttgggcaggctgcgcgggtcgactccgtcgggcacgatcagcgtgccgggacgatgcgagaaggagctgcgcacgtgaagcggcatgttgaaccgctgcgcgtactccacgcagcgcagtgccagcaccttcgaaccgcaactggacatctccagaatctcgtcgtagccgatgaccggaatgcgactggcctttggcacgatgcgcggatcggcggtgaacacgccatccacgtcggtgtagatctcgcagatgtcggcgccgagcgccacggcaagcgccacggccgacgtgtcggagccgccgcggccgagcgtggtggcgtctcccttggcgttgatgccctggaagcctgcgacgatggccacgtctccgagcgacagcgcgttctgcacgcggtcgggcttcacggccttgatgtgcgcggcgccgtaacgggtgtcggtgaagaatccggcctgctgaccggtgaacgaatgcgcacggtccccggcggcgtgaatggccatggcaagaaggctcatggagatgcgctcaccggcggtcatcagcatgtccatctcgcgctcgggcgggttggagtcgatgctcagcgcttggtcgatcaggtcgtcggtcgtgtctcccatggcggagacgaccacggccaccctgttgccctttttcttggtctcgacgacgcgcttggccacgcgcttgatcgattcggtatcggcgaccgacgagccgccgtacttctgcacgatgagagccactgctgtcctatcttctcgcggaatgcatctgcgtcaatactacgcaagcggcacgattataggaatttcggcactgccgcgcacgcgtgcgccgccatgcggacaggaacggccgcgctgcgggcgcaggtatccgggcgatgattcgcgtcggcggcgccgggacgggccgacgctggcagcctcgtttatgcttcgcggcgacctgtgagggcccgaccgagcgtgacctcgtcggcgtattcgaggtcgctgccgacgggcagaccgctggcgagccgggtgaccttgatgccgagcgggctgagcagacgactcaggtatgtcgtcgtcgcctcgccttcgatgttggggtcgagtgcgaggatgacttccttgacctcgtcagtcttgaggcggtcgagaagcttggggatgttgaggtcggccggtccgacgttggccatcggattgatggcgccgccgagcacatggtattggccgcggtattcacgggtgcgctcgatgctcatcacgtccttcggctcttcgaccacgcagatcaccccgtggtcgcgtctcgggtcggcgcataccgggcacggactgacctcgcacacgtttccgcagatgtcgcagaaccgcactttttccttgacttccgtgatggcgtcgaccagcttgcccgtctcctcgtcggaggccgacagcagatagaaggcgatgcgctgcgcccctttcgggccgatgccgggcagtccggcaaatgcgtcgatgagtcgctgtatcgcgccgtcatatgccaaagccattggtgtgctcactccgaatcatgtttgttgacgtgctggatgttcctggggttcttggggtcgtcggggccgtattcctccaccggcttgacgacttcgaagaactgcttgacgtcgtcgagactcatcgtctcgggcgagccaagtgaaacgtcattcatcgaatattcgtcgtcttccggcgccacggtcggcatgggaatgtcctcctgcgcatacgggtcggctccggcgaacggatcggtgtcgtcatacgcagggcgggatgctctctgaccggccgcggcaccgggagtctgctgcagatgcgtcgttcccggttcggctccggggttttccgggcgcccgggcgcagccaagtcgtcggaaggcccttgaagagctcccggggagcctgcgcctggcgcggcgatgctcgacgaagcggaagcgactgatgacggcatgccagcccaggggtcttccgcggacatggcctccggcacggcggtggggccaggggtggtgcgctcggagtcccctcgcgactgtgactgcgcatgggcaacgttctgaggtgtgccgggcgcgtcgccaccgcgtacaccgtcaacgggcatactgttaccgccgtcgttggcccacgggtcggtgtcgtcgctcaaatccggcacggcgatgtgtttcgtgtgatggccctcatcttgcggagcattccgtgaaacattccgtgaaacattgtgagacgcatcgtcagtcggcgaccaagcgtcgccagcccccgcttccgggagcgcccacggatccactgccgactgcgcgtccgcatgcgagatatcctgtgcgaccgcccggttattgtcgcggtcatgagccactgtcgcgtccggcgcgtcgggtacggctcgatggacttcgtccgtatcggccgatgcggtgtcgccgctttcgggaggagtctgcggctccttggcattgttgccgacgctcatcgcccccaatgatgcgctaagactcgctttgacgatctgggcactgatgcgctgctgctcgtctgccggcagctggccgaacggcggcgcgacctgcccgtcggccatcttcttggtgggcgcgagctgcacttggtcgccgaacgccttgcgggtctcagcgcgcatgatctgcaccacgttgcgggttccgccgacttcctcaccagcgacggccttcgcgaaggcatacttgctcagcgccttgtcgaacttgatccacaacgtgccttttccgcctggctcgtgctgttccaagtggatgcgcggcaccttgctgcggttcacgtacgcggcgacgtccgccggcaatccggcgaccagtgcatcccagcgttcgtccggcgtgcggttgtcgtcctgcggagaggattgcgcggctgtcggctcaccggccggcggtacttgagcggcggacggtgcttgagcggcgggagacggggcaccggcttgcgcatccgctgttgcaggcgcttccgtcatagtgggcgtttccgtctggagtgcgcgatcaggttgggtgccggtggttcggctcggtgacgtattcgtctggcttgtcgccgattggcgagcgtccgtctgctggttgcgagcggatccgatgaatcctcccctgcgcggagtcgtcccgcctgaccggctctcggcgatgccgcctgttcgcacattcactcctgcagctccgcggccagtacctgcagagtccgccccgggcgcagtgccgcccgcggccggcgcgacatccagtccctctcgcccggcaagtaagcgcgcggcgagcaattcgagccgcatgcgcggagaaatcgccccggtcatagaccccagggtggtattgatggtttctgccatcgacgtcaacgcgcccaagccaagcgacgacgcctgcctacgcaggtcgtccatgtcctcggcctcggcagcatcggaaagcacgctttctgcctgagcgccgcccaatgtcagcaccagcagatcacgcacccgcgccagcagatcctcgacgaaccgacgcgggtcgaatcctcccaccacgactttctgcaccacgccatacagcgcttcgccgttacgcgcgatgacggcgtccacggcctcgccgatcagcgcctccggcgtgaagccgagcagcgccacggcggcgtcgtgggcgatcacgccgtcaaccgcgccgaccatcaactgatcgagcaccgacagggtgtcacgcaccgaaccgccgccggcgcgcatcgccagcttgagcacgccgggttccggcttgatgctttccttggcgcaaatctcctccagatacggtcccatgacctcctggggaaccagccggaacgggtaatgatgggtacgcgaacggatggtgccgatcaccttgtcgggttcggtggtcgcgaagatgaacatcacatggtccggcggttcctcgacaatcttcagcaacgcgttgaaaccctgctgggtgaccatgtgcgcctcgtcaagaatgaaaatcttatagcgatcccgagcgggggcgaatccggcgcgctctcgcagttcacgggcgtcgtcgacgccattgtgactggccgcgtcgatttccaccacgtcgatggaacctggaccgccagtggcgaggtccttgcaactggcgcattccccgcatggatgcgaggtcggccccttggcgcagttgatgcaccgcgcgaggatacgcgcggaactggtcttaccgcagccacgcggcccggaaaacaggtacgcatgcgtgagcttgccgctgtcgagggcccgcatcagcggaacagtgacctgatcctgaccgatgaccccctcaaacgtgtccggtcgataacgtcgatacagtgcaagtgccataagctccaacctatcgcaacccggctatttccgggtgtctttccctattgtccccattacttgcgcacgcatcgggggcttgcccagatggtgccgccgcggcgacgtttgcggactcgtcaacgtcgatcgttggcctgtcggccgaaagccgccggacaggcaggctccgctcaggcggactcgccggtcagatgaattcgccggtcaccgggtcacgcccgtcgcgctcgatcgccgccatgatatgctcctcgctccggctgtcatgccagtgggcgaccgcaggcgggaccaatacgcgcaacgccttggcctgcgcggtgacggtcactggaagatgcccgacgtactccccatcggccatcagcaccggaggctcgtctccctcgtgggcgcgggttatctccacctggcgtacacgcttccagttgaatatctggctggcgagcaacctcccgttataggcgttggacagcgctttggcgcattggccgacattcggcttgcagttcagccacaccagatccagcattccgtcatcaagcaaggagtatggagacacctccagtccgcctccgatgtaccgtgcattggcgactgtgagcagaggagcgatgatgtcgtgttcctccaccgtgccgtccgacagcgtggccttgacgtgatagccgtactgtttcatgcgtgcaatctccaccagcaccgccgcagcgtatcgcgctgaccctccgggaaggcgcgaatggttggcccgatcgttgatgcttgcgtcaagcccacaattaagcatccccgcatagtatcggtcgatcagcccgttcactgggcggccttcctcatccaccacgggctcaccggactcgccatgcaccatgcaggcgatctccgtcgagcgcacgcgtcccatatcgacatccagataggtgccgcatgcgatggcgccgacgatgccttccaccgcggttttgacccggttgacgggcagtttcagacctcgcgcgaaatcattgcccgaaccgaccgccacaatgccgagcgggatgccactgccgcagacggcgttggcccccaaggcgatcatgccgtcgccgcctacgaccaccaagtagtcgtatagggcgcggttctcgcgagcggccgtcagcgaatcatcaaagctggtgccggtcagatccattacgtcgaatccatgccgctgtccggcttcggccagcatcgtgaatacctgttcgcccacgacggcaccccaccccttgtttgagacgggattgccgatcaacgccaccattgtcttcgcttcgcccatacgtcaaacataatgcatcaacggcattccccgccagtacaggctccgcaatcggtctcggcatcggcatcaatgctgtctgcccacacccgccgcgagtggcccatcgactattcacagctgatgggcccggcgcgggaacgctggctgacacgtgacatgaatggcagacgcaacggcacggacaccgtcacgacgatgtcatctccctcgacgacgcacgactccagttgcgcgtcattctctgccgcggcacgccgccctacggcacacggatcggatgcgccaccagaccagtacgccgacgccgccgacaatgccgtggcatcggcagcgctccgcgcacgcgaccggcagagcagcgcacctccgaccgacgcgacggtcgctatcagtgcggccgcgagcgcgatcagcatcacgcaggccatcgttcccgacccttcatcggattgcatcagccgcgagcaataggctcgcacgggcgatggtctcctaggttgaattcgttgcgccatcgtgttttcctttcgtcgctattccaccgcatcagaggcaagctgcgcagaggagcttgaccaccccagtagctgcgcgacagcctccgccagcgggagggcaagacggcacagtcgctccgcgacagccctccgggccctgcaattacagacatgctacgcatgccgcccattgggttcactgacgttcacccctcgcctacaaacagctctgctgtttgctcacggctcggcccgccagcgagggcaagacggacttaggcatcaccgccatcctgtggccgagccggttactttgacgggtagaacgccgaatggatccggcagcacggggcattgcgccgtcacgcgtatcgaatggccatcatcagcgaccgacgccaccgcgccttcgcccgcgataccactcgccacggcgttgacggacatccccgctcccgataggccgccttccctcgtcaccagttcgcgaactacggccgacgcggcatcctggcatcgcatggacaccgtgaccgttcttgtcaggcagagcaacaccatcgccaccatggccacagcgggaagcaccaccgcgaactccgcagtggcggctcccctgtcagcatgtgacatcgtcgccatcgtgaatgcccgtcatcccacactcaacgacttcttgacgatgttggtcagcaacgtcttgatggtgtccgatttgagcaacgcgaccagcacggccgcgaagcccgtggctgcgaccagcaccaccgcgtactccgcggtggtggccccttcctctggctccgcgctcaacgtgcgcagccgtgcatccaacaggcaaatgccccgccgcgccgacgcccccatgttgcccaccgtacgtgtcatcgacgcaataggcccggtacgtccgtcaatggcaatcatcgtctcctcgatattcatgacaatcctttctcgactggccttgcccaactacaaggcactttccactgtgcctcatcaggcccgcccaccatcgggttttcgggcaatgtggtcgaaggctgccgagttatccacaatgcggcgtgtcatccacacattatgtggatgacagacggccgtgcagcattcttcaccgaccatcgggcggcgtcgccaccaagttcatcccacgaacgccatcaccgaggggagtatgcctagaaacacaaacgccggcagcatgcacaatcccgtgggcagcagcagtttcaccgacagagatgccgactcctgctcgatcgcggttcgctcgccttccatccattgctccgaagccgtcgtcagagggccgatcggcgaaacaccacgagtccacgatggctccaacacgccccgaaggattgccgaagtctccgcataatcaccgaaatcggcggcattccaagcatccttccatgacgatccgcggtgcagagcgtccgcaaccgcacacagcccgccgccaagagcccctccgacagcctcacccacaccctccagagaacgcgtgacggacatgcctgaccgcagcgacaccgacaacagtccaatcagcaacggcaacgacacagcagcacccccttctcccgcaacatcggacggcacgccagtcaagcggcccgaccgtgccgagtccggccatatcatcaatgccatcaacaccatgacggcgcacgccatcgcgttccacatcaccccaccccttaatgttcatgacggcaatcagacggtatcaacgttcgtaccggtgttccgcatcatcgaggacatccacagcagtcccagcgcgtagcctgcgccgcccaccgccaggcacgcattgccctgcgcggagccgaacagtacctgcaccgggcgagcgcccagcagctctcccaaacctatggtgaccaacggcaacgcgcccaacagcgccgccgtcgcgcgcggaaccgcgaaagcactgcgtcgggaatcatgcaacagcctggaaatccgatggttctcgccgaccacatccagacaatcggcaagggagcatcctgaccgctcgcacatcgcacaggccacggcgagttcgaaggcgacatgttcggcctgggcggcgctctcccccggcattcgctgtcgcatcagcagccgtttcaaccggcttgcggtcaacggcacccctgcgaatccgctcccgtcgacatcggcaagaacacctgagatcatgccgccggcccgaacagacgaactcatatgcgcgatcacgccggacagccccatcacacggccattacggacggcatcaccggcaccggtctttcgccctgctcgcggcaccctcgaagagaccggcaacagggcacggccgcgaggggcatacggccacagcatccatgccagcacgaccatcagcgcgacgcatcgcggcaacccacccacgctcatatgtctcacctcacatgcctcattcacatgatccatctcacatgccccatcgcccggtgaaatcatgccagcgcgggcatggcatcatggcgccctcaccgtcccacaacgccaccacgtcgccggacaacactccgtcgcgcatgccgaggcacccgatctgagcgattctccggcgaccatgatgccgctcaagatgcagcatcacgtcgaacgccccctccgccagcatcgtcaacgtatgcgcgtcaaggccggccagcatgcccagcgcgatcaatcgcgccggcacccggtcaatgccatctgcgtgcaatgtggtcataccgccaaggtggcccgaattgaacgcgcgcaacagatcggcgatttcctcgccacggcattcgcccagtaccacccgatccggtctcatgcgcagggtcgccttgaccagctccggcagtcctacggctccggcaccttccacattcgcccctctcaccaccatcgacacatggttgccgcgtccgagatcccccaattcccgaacctcctcaacggtgacgatacggtccaatgaatcgcattccgcaagcagcgctttcagcagcgtggttttgccgctgcccgtgccgccgctaatcagcactcgagcccggttcttcaccagattccgcagcaacgtcagccagtccggcgggaacatcccagcatcacgcaatccggtcaatccgagcaaccgccgatccggaaaacgaatcgtcaccgccgcgccctgcgcgaccagtggcgcgatcaccgcgtgcacgcgaatcccgtcctcgctcgacgcgtccgcaatcgggcaggcgtcgtcaagacgccgtcccaattgcgcacacagccgcaccgcatattcacgcactattcgcggcgtgcgcaacggcataggcaaccggcactccgtcattcctccgcctcggtccgcccacacccttccctcgcaggtgatcgcgacatcggtgaccgttggatcgcgtgccagcgcatccaacggcccaaattcaatcatgggacatcacctcccaaccccgtctcgatggcgccgacgactgcatccaccgccttgcggctgctcttgccgatagcccggatgcccagcccctccagcacatcgccatgcagcccgcggtccggagccaccaccccggccagctcctcatgcagatactccgatgcctcgtgcgcgtcgaccacgccgccgcggcgcgacagtccgcggggcacgacaccgaccataatcgggcgcgactccccttgccgtatcatcatcgccctcgccgcccgagcacgcgccagaccgagcaccgtcagctcggccaataccacctgacggcactgtcgcagcatcggcagcgaatgcaacgcgctcggagccccgatatcgacgaccaccacatcattggcctgcgccagcgcctcaagtacggcagagaccgtccatggctcaggatccgaaccgttccaaggttgactggcgagcacccccacgcgctcccattgcggcaactcgccattcagcgccgcaccttccgttttcccgagtggtatatcgactgtttgaaatcgcaggcccggctcgttttcgatgcccagcagcacgtcgatgcctccggccgcgaaatcgcagtcgaccagtgcgcactgcaacttgcgctgggccaagcgccatgcgaccatcgccgcgaacacgctggttcccgctcccccggacgcggaagagaacaccactgtattacggcatcctgcatgcgtcagcgtgccgatcgactgattgccgtccacggatgagactgggctcgggcatacgactcgcggcatggtcatgggcttgcgcgcacgcatccgatggcttgcagcatccgagtcaagccgggaaacctgcgcagccggccttcgccaagcgtccggggaggcccggcgaggcggcatgggaacctgcagcgacgccgctgcacccggcggagcggcggcgccaatcttctgaactgtaacgttgtgtgtcatattccgattgaaacgaatagcgccgcagcggcgcaacgtgagacgacaatgtggtcgaaggcccgcgacttatccacatcacggcgtgttatccacagtttttgtggacagacgacgcctagatggcatattcgcgtgatatggaaccgtctccacttagcatccagtcgaaaacacccggcagcggagtcgggaggaatccgagccaacctctctgcaaccttcgcccgtgcgcatctcgccgaacgtcgcataccccgcgctcacgaacgcccatcgcgcctccgatcatctctgccggtcagtcggtcacggcaaacattgaccagaacccacccgcccgtcataaccaccggcgtgccacaccagaggaaaaacacacaaaaattgcattgtgtggcttttccgcaggcctcacaatgaaatgtgaaccctcacatcgcatggtgtggtacagcacaaatcatgagaaccgccatttttcaacaatcccagaagcaccccaatatcctccccggccacaccagccccaaaaccgcataaaatcacgtggtgtggtacagcccgccgccaactgccgtccgccaccaccatcgccaccgcaacacgggccgaaatcgccgcaatccgcgattcggcgaaaaatatcgtttcgaaggccaaagcccggtgattgcgagttcggcgccagaaaaggccgggccgaacgatcacgctgccccatcaacacaccggcaatgcacccgggtaaggcacactttcgaccacttaacccaatgattgcacacaggaagtcacgcggaacagcaggagccaacggcccgaaccccaacccgcgccaagcccaccctcgccattagaccgccgcacatggaaaaacccgccggagcgggtttttcctgcaagtccatcttgagcagatcgctgcacaacctcatcgtcgtaacggtaagtctttccattgcccgttcaacgtaacagtccttcgtgaccatacactattgtgggcctgctcttaagttgtccttgcacttcataatctaggcgcaacaccgcgataccgcaactcacccaactacgttgtgcgattttttgcgcaagtgttcgatatcgctcaattatgacggaaaactgtcacctcatgttcctatcggacgggttcgttgttcacttgtgtgcggaaccgacgacccatcggcgtgtcgccgtaccatcacccgacaccccatccgtacgacaatggtaaacaaccgctgaatttcttacacgccgcataggaaactgccatattctcgcataaagttatatacatggcacaaacatttgacgcaccttcaaaggctatcctgcgcagccaaatcgccgagcacatagccgagacagacaaacccgacaagcgcgagccgcaagccggcgaagagccgctgcccgcggatcgctatttcgaccgagaactcagctggctgaagttcaaccagcgagtcctcgaactcgccgaggacgaagaccagccgctgctggaacgctgcaatttcgccgcgatcttcgcctccaacctcgatgaattcttcatggtccgcgtcgccggcctcaagcgccgtatcgacaccggcatcgccgtcaccgcggccagcggcctgagcccccgccagcagctgcgtgccatcagcgagcaggcgcaccgcttgcagaacgagcacgcgcactacgtcaccgagaagctgctccccgccctcgctgacgagcacatcgtgctgctcagctgggaccggctcactaccaccgagcaggaacgtctctcgcgctactaccgccagcaggtcttccccgtactcacgccgctcgccgtcgaccccgcgcacccgttcccctacatttccggcaactcgctgaacctcgcggtgctggtggagaacccgaactccggcaaatcccacttcgcccgcgtgaagatccccggcaacatgccccgcctcgtccccgtcgacgacctgaccgacgaggagagccgcgaggagcgcttcgggttcatcacgatggagaacctcatcatcgcgcacctcgaatccctgttccccggcatgatcatcaaggaggcgcgctcgttccgcgtcacccgcaacgaggacatcgacgtcgaagaggatgacgccgagaacctgctcaacgcgatggagaaggagctgctgcgccgccgcttcggaccgccgatccgcctggagatctccgacgcgaccagcccgttcctctcccagctgctcgccgaccagctcggcgtcaacccggaagaggtctaccgcctgcccgcgccgctcgacttcaccgtactgttcgaactgcagtcgctcgaccgcccggacctcaagaaccgcccgttcatcccgaccacgaaccgtcagatcgccgaagtcgaatcgagccgcgctcaggacatcttcgccgcgatccgcgagcgcgacatcctgctgcaccacccctacgattcgttctccacgtcggtgcaggcgttcctcgcccaagcggccgccgacccgcgcgtgctggccatcaagcagacgctgtaccgcaccagctccaactcgccgatcatcgacgcgctgatcgacgcggcccacgccggcaagcaggtgctggcgctggtcgagatcaaggcgcgcttcgacgaggacgccaacatcgcctgggcccgcaagctcgaacgcgccggcgtgcacgtcgtctacggcatcgtcggcctcaagacccactgcaagctcatcgaagtcgtccgccaggagcaggacggcctcaagcgctactgccacgtgggcaccggcaactacaacccgaagaccgcccgcctgtacacggacctcggcctgctcacctgcgacccggtggtcggtcaggacctgacccgcctgttcaaccagctgagcggctacgcgccgaagtccagcttccaccgcctgctggtcgccccgcgcaccgtgcgtaccggcctgattcagcgcatccgccgcgaggaggacgccgccaaggccggcaaggaagcctggatcaaaatcaaggtcaactcgctcgtcgacgagaagaccatcgacgctctgtaccgcgccagccaggccggcgtcaagatcgacatcgtcgagcgcggcatctgcgcactcaagcccggcgtgcccggcatgtccgacaacatccgcgtgcgttcgatcctcggccggttcctggagcacagccgcatctacgccttctgcaactccgacggcccgcagatcggcgaaggccccatctccggcccggaagtgtggatcggctcggccgacctgatgcaccgcaacctcgaccgccgcgtcgaggcgctggtccgcgtcaccgcgcccgagcagatcgacgagctgattcgctatgtggacctgcagatgtccgactccacggcctcctggcacatgcagcccgacggcacgtacatccatcattcgcgcgacgacgaaggccgcccgctggtggacagccaggaatatctcatccgcaagcaccagcgccgcccgcgcaccaacaactgacatggcacccggccgggcgcccgataaggcatccggcacgagcctcgtgcaccgcatcttcctcaagacaagcggcgcacgaggtacagtaggtgcataagccgatggccgacccgcaagggccggccatcgtcattacagacgagaaacaacgtagtcatgcagccggtgaggcataatggaagggtgagtggtgaggtgaaaatcgtagaagctgcaggcgcggtgctgtatcgccgcaatactgattttcaaggatggctgaagttctcggacgacgggcggcagacgtccgcggcgtcccgactggccgacttcgatacgcttgaagtgtgcatcgtgcaccggccaaaatacgacgattggagctggccgaaaggcaagctggagctcaacgagacccaccgccatgcggcggtacgcgaggtcagcgaagagaccggagtgccggtcgcgctcggaccgttcctcggcgaaatcgaatacccgcttgccgaggaaggcaagaaaacccgccgttccaaggatcgaaccgtcgacacgaagcacattctcttctggatggcaaggccgatcgaccccgaggacgccgtgcggcgggccgacgcgttcggccccgtgcatcgcgctgacgtgggcgagatcgacagcgtcatgtgggtgagcgtgcagcgcgcgcggcgtatgctcacccattcgaccgaccgcgatattctcgcgttgttcgtcgaccgtgtggaggaaggcgcgctggacggcgacatgctgctgctggtgcgtcacggcaaggccgagccccgcaagcagtggacgggtaccgacgacaagcgtcccatcacgccgcgcggagcgtcgatggcgtattcgctcgaccgtgagctcgcctgctacaatcccacgcggctgatcacctcgccgtggctgcgctgccagcagaccatacagatgctgtcatggcagaccggattgccgctgcatacggccgaaccgctcaccgaggacgcgttcgccgccgatccggaagcggcgtggcagtgcttccacaaggagctgaaaaatacgttgcagcgtcacagtgcgaccgcggtctgcatgcatcgtccggtcatcggcggtattttcgggcatctgcgcgaactgtgcgcgacgaaatcgctgatgaaacggctgattccgtcctcgccgtacatgccgaccggcaccgccatcgcgctgttcgtggtaccctgcggtgacaccgtttccatcatcgacattcagaaggtcacgccacttgtctactagcatgcattttggttcaggctccgtcgttcccagccgcacgggattcacgccgaccggctcgccgcggccatcgcgccccgggcagatcgaccccggtctcatcgagggcatcgccggaggcgccgatcccagcgtggtcagcgaaatgagtcacgcatcggcggccgctctgctcgaccgcgtgcatcactccgctgatccgcaggttgtggaacgggtgctgacgctggtcgaccgcgaaggcgtggacatgatcgccgaactgtggagccggtcggaacccgactcgctgccgggcatcatgtggcggctgtacacgttgcgctcatggatgcggcgcgaccgcgatctgatctcgcggctgtggcggctcggcgaaccggtggcgaccgccgcgtcggccatcgcaggcgtcgaccaggcacccaccgaagcggacatcgcacatacggcagattcgattctcgcaggcgcgttcaccggcgatttcgccgtggctctggagagggcgagcgcgttcgtcgacgtggtggcgcagggattgcgcgtcgaagcgcggcacatggtgcggcaggccgaggccaaggccggctccgaaaccgcgaccgccgcagacctggccgaagcccatgtcatgcgctcccgcagcgccaagctgatgcacaccgccggcaatctcatcgccacgtccaaggatttccgccacggagcgcagctgtggcgtcgcggcaaactggactgagccggcgcaacacgcggacagcgtaacagggcaaacccggatatactgatatccgcgtcgggccatgcatagccccgggctccattttttgccgctgcgagcggcctttgcgccgacaggcgctttcgtggttcggcgcattctctttttctttctcaccccgttgaatccgcaacacgctgctgctgatgggacgagacgtacagcagacagcggaaaccgtgggcgatgtactgcggcacataattcagccccgtcgcgctcatgaagtcctcggcaccccattcaccccacgcatcgccggtggccagcagaccgatcggcgacagctcgactatacggaactgggcatgtggcggaatttcacccactgcggcgtgctgccggaggtcgatccgctcgcgtcgccgcctgcgccacgggatgccgcaggcgccacggcggagccagcaacggcggctgatcccgacatgtcggccgaagcggtgcgcgcccgcatcgaggccgcccgcatcaaggcggaaaacgaactcatcgaccacatccgatcccacgcggacgccataggcttccccggcgagctgggagtcagccgcgccgtcaacggcatctgtctgcgagtgctcaccacacgcggtgatgacgccttcgacctgatcaaagacgtgtcggatttcgtcgttgcgtaaaatcgcgctctcaaaactcgcagatacagcatgaatacacgcaaaaagtgcttgtatccgcgagttttgagagcgcccctgacgctattgccgcaccaacggcggcatcggctgccacttcgggtcgtgcatcagcttgtgcgagtcccgccatcccttggcgatctgcaccagcccggtgcgcacgtgctcgcgatcgaccgcgaccaggcggataacctctttcgccaccgtggcggccgttcccaaggcgaacagcactggccggtagtcgccgtgcaccatgaagtaccgggccatgtacccgcggttgcgcaggatgtggtaccggttcatgtccgaggtggagttcagctgccgcaatccggctatgtcccagttgctgatgtcgcgcgtgcgccgcatcaccacgtcgggcaccacaatcgagttggtgaccttgctggccagatacccgtacatcgtgtcgtcccagtagatgaagaaccgcgggtcggggagcccgatcttctccacgatgcgcctgcggaacagcccgccctcgaagcacagcgtgttcatcacgcggtacccggcggagccgaatgcggccggcgcgatcgggttcgggatgcccagcggcacgatgaagttgtactgccagtagaacggcccaccgtcgaaatcgagcttgccgccctggatcacgtcatggtcgcgaccccatttcgcgagcttctcgatgccgtcaggcagtacggcgacgtcgtcgtccatcacccagaaccattccgccccgagatcgtacgcgacttttactccgacggaaaacccaccggcaccgccaagattgtcggtttgcggagcgtacaccacacggctcgtgccacctttgcggtcggcgtccgtcgtcccccacagaccgtcggccttctcccggaattcgtcgaccatgtcctgcgtctcgtcggagtgttcgttatcgacgatgacgatgcgccatggcgcgaccgtcagctgcgcgaatgaggccaggagttcctccagcaactgctggcgcttatatgtcaccacgatgatggcgagcttgtcgaacaccgcacgggcatcacaggtgtgctcgaccgtggcttccccagttttgtcgttcctgtaagtcatacctttcattgtgacaccgtttatgtgaaggaaagtgatagtcacaggattgccaccagacaacgccataatgtcatgccgacgtttccggccgtgcagctaccgttcagagagtatggaggtgggtcatgagggcggcaccacccggcgcgtggtcagtcgccggagctgctgtcaccggcgctgccatcgccactgctcgacccgctgccgtcggacgagtccggggccggctcgccgggcacctgcccgcgcgtgaccgtcaccgtgttctcggagccatccctccacataatccagtccacggccgtatggtcgtagtcgtccgcgtcatcgcccgacggggtcaacgtgtagctgccgaccgtctcgcccttctcgtcgacgatgatgttctcgtccgtggttttgacgtagaactgcttcagcagatagttggctccttcgaactcaccggagttcagcatcaggcgggcccaccgcccgccgtccagcacctcggtgaccttcaggtcgtgcgagaggataaacacacgcttgctgtcgctcgactcatcccactggaaatacagggaaccgtccgagaactggccgaagtccgtgaagttcacgtactggtcatccttcgtgttgatgttcagcaggtcggtgacttttctggtcttgcccgtgcctgcatccagaatcagcagcttgttgccgttatagctttcggagggattgagcacgtactgattcgcgccgaaccgatacaggccctgcaagtcgcatcggtaggtgtcgccgggcgagcagtagtccgaaggaatcttcacgatttccttgttgctgtcgatggaatacaggtggtatgcgctgtccttgaccacatatgtgtcgaacacgtggtaatcgtccacatcgatttcagtagtgttcaacgactggtatccgccgctgtccttgctgatgctcacgctgtccttgaacgtctgcaaggtctcggcctgcttcgcgccgccgctcaatcccatgatctgcttgtggccgatttcgacctcacgctgatcgtcgttgacagtcctcttctccgtcgtcttccaacttttctcgatggcgacgcgattgttggattgcgcgagcacatcgaattcgtaatcctgctgcaggttgatcagattgtcttcctcggtgcgcagatcgatgcgatcggacaattcgccggatttcaaatcgacctgatgggcgaacaggtgcacggtttccggcgtggtgccgaccgccttggtcttgaccgcgtagatcacgaacacggacggattgggaccgtatgtggcggcgacgaccggatcggagtacatcttctccccggatttcagagccgagaagtagatcaccttcgattcgtccattgccggcgtccagacgccgaacgcatattgcccgtcatcggcggattggctggaactgccatagtcggaatcgctgctggagctcgcatcgccgttggcgcagggcattacgtcggaaaccactgcgccgccgtcccacccccagtcggaggtgtcgtagttgcagacgaagttggtcatggtgacttcgctgaccgcttttttgccttcgatctgcgtcggggattgcttttgcgttttcttcggcgttgcatcagtcgtgtcgctggtctgcacgggactcgcggccgtgttcttcctgccgtgaaggatgaggaatgcggcaactccgccgacgacgatcgccacgacgacgatggccgcgatgatggcgatgatgatcttgcgcttcttgcgttgcgcgggcgtaagtggtggcttcttgccgggttgggattgcgacccgggctgaccttggggtgcgctgccgccgttatccgcggggcccgctggctgcgggacaggcggcaacgtccccgtaccgggtactgtgttcggagcgaagccggacgcggctgtaccaggttgaggcatctgcgccccgctaccgggcgctgcggcggcaccgcttgcgaccggaatgccgcagtatgtgcagaacaccgatcccgctggaatttcattaccacatcgagcgcatctggccatcatcatcccctgtctcttcgttacgacaatcataaccaattcgagagattttgaaaggccgcgaagccctgcggccgggcgcgatgtcacgcggtctgggctatgatgaaggcgcaaccgaacgggagccgcaaggctgagaggaagcgacgcttcgaccgtcaacttgatgcgggtaatgccgccgtagggacgagttgtccagtcgcagcgcagcaacaatcggcatccgccaaccgatggtggacggttcccagccaaacgcaccgggcatcccggcatataacagaacaggcataacaaaaaacgcatgattcgggtcatggaggggcgcaccacctcacagggtacggcttgctccagcgacccgtttttcatatcggcggacgccggcgcacccgatcggagatcgaccggcaacggccggcagcgcaatgtcgccgatatgggaatcacgccagcgaccgaggagggacacatgatcatcaacgggcagccggaggacatcgccacgccgctcagcgtcgacgaactcatcgcgcgcaagggccttaacgcgggacgcgtggcggtcgaggtgaacggtgccatcgtgccgcgcgacaagcgcgcacagaccatgctgagcggcaccgacaccgtcgaaatcgtcacgttcgtgcagggcggctgagagcccggcaaacacgcggcaaggcatcggcacgggctcatgccgatgccggccagcgaaccgcactccgacccgaataccgcacgcatcaagcgtcatatacctcaaagaaaggtaccatcatgaccatcgcatcaaccacaccggccgcccaatcgaacgacccggtgctcgacgaactcatcggcacggcgacgaacaccgcgctgctccccgaaccggacgcgcacgcctacgacgacatcgcgaccggcgacgccgacccgctggtgctcggcgggcacaagttcaccagccgcttcatcctcggctcggggcgctacgacctgaacctcatcaaggcgaccatagagaacgccggcacgcagatcgtgacgatggcgttgcgtcgctgccgcacgaccgagaacaacctgctcgactacatccccaagggcatcacgatgctgccgaacacgtccggcgcgcgtaacgcggaggaggccgtgcgcattgcgcgtctcgcccgcgaggtctgccagacggacttcgtcaaggtcgagatcgagcacgagacgaagtacctgctgcccgacaacgaggagacgattcgcgccaccgagatgctcgccaaggagggcttcgtggtgatgccgtacatgttccccgatccgatcgcggccaagcggcttgaggaggccggcgccgcctgcgtgatgccgctcggctcgcttatcggctccaacaaggggctgcgcatgcgcgacttcatcgaggtcatcatcgcgaacacgcacgtgccggtgatcatcgacgcgggcatcgggcgtcccagccaggccgccgaggccatggagatgggcgcggacgcggtgatggcgtacacggccatcgcgagcgccggcaacatcccgctgatggcccgcgcgttcaagcacgccatcgaatccggccgcgaggcatacctgtccggtctgggcacggtgacggagggccacgccgtgccgtccagcccgacgaacgccgccgactacctgcactgagccacccgtactgagtcgcctactcacgtcgccgcccggcagcgtgcacccatacgtggggcacgatgccgggtgtaccttaatctcgcgatgacgcccagcccgcggcccgagaccccgcgatcacaggtcaacggccatcgccagctccaggtcgtcgtccagttcctcgacatcgaagtcgagcttcctgagcacgtcgtcattgggaacatcgccaaggggcgcatcatcaccgtcgccggggcccatgtcaccgggatcgtcatcagggcgcatcagcatcgattccacgacctcatcatattggtccggattgccgcggaacaacgccaaagcgcacccccgcgccaggcgctcatccgggaaccgtgccaatacgatgttcgccaaggactcgcccaaatgtgccttcgcgttcatttcctcctcgctcagcttgtcgagacgcttctgcatgcggcgtgtgagacgctgtatgtccgcctcggacgtactgtaaagcgtgccgtccgtcgcgtagtcgtcatcaagtccccgtgagaattcatcgaatccgttcatgaacgcgattatcggcaatgacagcagaccgaaccggacgagcgtctccgtaagcagttccagctgctcgacgcctcggtcgaaccgcttgcggtctcgccgctcgaatccgaggataaggtcatgggccatcacgtcgcccatcagcgagtatgccagatcgttcaggaacgccacatcctgccatagtggttcgcccggcacatcccgattgtgttccagcgcgagcatgcggtcatcgacatctatcggttcatcgtcccacatcttctcgtatgcatcaatcagccggacgacatcgtacatgtatcgccgctcgcatttcagcagatccagcctatcctccatgtcgatgcgggcgcagctctcgcagtcgcacagcgactcgtcgcccacctcggcatatccgcgaatgccatctcgcttcgacgagcatccgcccgcgtcgcgatctgccgtcgcaatctctccgacagccggttcctcatcgtcatgacgacccatatactcactcatccactgattgccatgcagctcgtattccgcatcggcctgcgcccgccgctcgtgcagatagtcgaccacgcgccgataccgcatgtccggcgccgcaccgaagcgcaacacgtctccgtcctcgcgcagcatgcacatgccgatgccggggtacagcagcagcatccgggcgatgtcaaggctgcgccgctcatcggcaccccaattgagcagggtgtatgccgccagccggtgcatctgcgtcgaatgctcctccatggcgagcccgcgctgcttgcggttgccgaaccgcttcctgccgcgaggccgtcgcatcagttcctcgacggtcgtcatacgaatcagcgacggcatgtaatcggacgggtcgtcgcgaaacagagccagcgtggaatcgttcagcagctcgtacagccacaccgagatgccgtacttgcgcaccgtttcggagcagccgtgaagaaacctccggcactcgcccaccagccgcccgttgaatgacatcgccgccgcgcacaggttcgtcgtccaactgccgcacgcgaacacgtcgcgcgccagcgcgtacagccggtgatcccatggcgtgggcgtgccgtccctgtcatagtcttcgcacaccttgcgcatagtctccggagagacgagttcctcgaatcgccgctccaacttgttgatagcctgcagaaatccgatggtatccatcgagaatgatgtcgccatgatcgctccttttcgtatgcgccattgccgtcacggtccctccgcgtcctcgcgcataggcacaccatggcacacccaaggctcccggcgccacccaccctcgaaaatctgtggatatgtggataactcaccccttatccacagttgtccacattgccggcggaaccggcaagcccggccatcaagaccggtgaaaccatacgaaaatgccagaatggaacaccacgcgcataatcgacttccactatcatggctagcggaagtcgattacatgccgcaggccgtcacaccagatcaggcatcaaagggaagagacaacgaacgaaaacaaacgcaccgtgacgattctcataccctgttacaacgaggaggagtcgctgccgatgctgttcgcccggctcaccacgctctctgagaacgcctagctggcaccggacgatgacgatcgcatcgactatcgcttcctgttcgtggacgacgggtcgaaggattcgacccgcaacgaaatccgcgagttcgccagcaaccgtcagcctacgtaaggtgtccgcgcggacacgcacagctgtgcccgcgcggccgtccgtggctacatgaatttcttcagatccaccgggcagctcaggccatccttgatgctgctgagcttgtccagcgcacctccattggaggagtcggtggagttcttgttctcgtcggcgggcttcgacgaggtcttgccggaggatttgccaccgtcggtgccgttcgagctgccgtcaccgttcgcggaaccgtcgctgccagttcccgcccactggtcctccaccgcatccggcacatcagcgccgcacgtgtcggtgaccttgccgttggtgcccgtgtagatgcccttctcgttgataatcggcgtggtgacgacgtccagcgtcgacttcgccttctccgccgcccgcacggtgaacgcgatggtcaccgtctcacccggcttgatgccctgggtcagacgcaggttgatgaactggcggtcctccacggtgccgttcgacaccatttcgccggcttcgtaggcgagcgacgtgatcgcgccgccttcgggcgccatcaggaacagtcgcggctgcatcgtgcccttctccgtattgccggtaatgaacgccggcaatgacttcgcctgctcctcggtcatcgtgttcttcaaccgtaccgtcaccgtgtattcgtcgccgaggccggcgctcgcgatggtcatggggttggtagctcgggcgggcgcgtccacttcgtcgctgatgcggtacgagttcgcggcgaaatcgctgccgcacgtcttcttgacggtgatgctcggctcaagataccagctgagcttgctgggcttcgcctcggtcacgtagacgccggccttcggctgttccacactgccgggaatcatgcccgcgacgttcgcgtcgaagaccttggtctgtacgagcgccgccagctcctcctcctgcgccatccacagcttgaaatggccgttcgcggacgtctgccgcagcgccttgagcatcggcgacagcgtcgacgtgcccgcgcccgagaacacgtgggtcatgatcgtcttcgacgccttgttggtgtaggcgttctgctccttgtagatcgggtggtccacgtacagctcgttgaggaagaacttgaccgtgttcgtgccgtccaacaccttgccgtcactgagcttgaccgatcccgtcgcgccgatcagcgactgcaggaacacggggtcaagcgcgaacacgccggcgatctcctggttctcgttgcccggctgcgcgagccacatgttcttcaatgtgaccgcagcccgctggaagttcgggttgacggtggtcgtctgtgggtatttccacacctggtcgccgaacaccgcagcttccttgacgttctcggcatcgtacggctgcgtgccgtaggtgatgtcggtggtggcgatgaagtcgccgatcgtgaccttgccgtggtcggcggtcaccggcgcgatgttgccgaccatgccgccgccggaccgcagctcggccggattgtagatcgcgaccaggtacgtgcgctcaccgttctcgcccagcagctgtggcagcaggttgatcagctcgtcgtattcgttgagcatcttgtccacggatttcaggccggagacgccggtcttcaccatggaggcgatgctcgagctcttcggaggcgccagcttctccagccgccgcgtctcgactttgatgtcggctcgggcctgcttgacgatgcccggcatggccgtcaccgcgctcaggtcgacggatttgtctttcatggagaagccggacagctgcttgctcaggtccatcaaatcggtgaacggcccgtccaccaggtttcccatggcgtccagcatcgtgcgcgcggcggtgatgtcgttcccgtacgccgtatggtcgcgcaggaacgtccactgcgacttgtccagttcgtcgcgcagcgcccgcgtggacgtcaccatctcacgtgcggacgtgccgatgttacctccgccaccgcagccgagcgcggtgttggcgaggttttcggaagcggagatgaagcggttcgcctccgtgtacagtttgagcgcggagattccgtagatgccgacaaccgacaacacggctcccagtagcacgaacaccacatacagcacgatgcgccgcggacgcagcgcttgagacaggaattgatgtccttttcgtccgatgtgctgaggggatcggcgcatgggttaacctcgtttgcttcgtgttacattccgttttgtcgcgtccgtcgttccacgcgacgaccgttatcgttccgtcgggttcgatggtctgccgtcacaccgtcttttcgggtgaaccggctctcgacgctacgtaatacaacctcagatgataccgcgcgatgcttaccgcacgctaagtcttctttctgaaccgttgtatttcgacgtttttttcaccattgcccgggacaggcggaaggatggcccggcacaacacccgcgaccttgtcagactgctttcagacttcattgaggggtataacagtatggagcaagataacatacacatagcgcgaccatagtgttgcctacgggatgccgtgctttacggggcctttcggggttcttcgggtggcgtcccggccactgtcacgaaaacgcgggcgcacggttgccatgatcgcagcccccgctgggaagaactggagaagtacacgcatgttcgttctcaagaacgcatggtcatccatagtccgccgcaaatggcgcacgctgttgaccatgttcatcgccatcatcgtcacattcgggacattgttcggtttctccgtcctgcacgccgatgaatcggccaccgatggctacaacccccagctgatcagcgccgtcatccgcccggatgcgaagaccaaggcaacctacaacggcgccgattcttcctatacgaagaactacctggcgttcgacgcatacgacaactacgcgtctgcgctgcaggccgccggcctgacgtacagctatgcactcaccatcaccgtgccggtgcggcagagcggcgacgtcaaggccatcgctggcaccgacgaccagagcgccgacaagaccggcggcgagatgctgtaccgcagcttctcttcgctggaggccgcgcatgagaacgagctcggccggtacaagatcgtcaagggcaagcaactggactactcgagccagtcgaagacaggcgtgctgatttcacaggcgttcgcgaagaagaacggcctggacgtgggcgacaagttcaccgtcgcgttcccgaacgacgcgaagaagaccatcgagcagaccgtccgcggcatttacgagtacacggagccggccgccgcggggcagggttcggacgccaaactcgccaaggacaaccgcgacaacgtcatctacaccgcgtactacaccttcgcgatggacggcctgtatgcggccgacggcaaaggctggctgattcccgacctgaacatctcgttcctgctcgacagcatgtcgacctatcggaagttcgagaaggtcatcaagaaggcaaagctgcccgcgaaccatgagctcacctcgccgacactaatcgagcacgagaagcagatcgcgccgctgcgctccctggcgagctcgatgaagcctatgctcgccgccctctggattgtgggcgcggtgctgttgctgctttcgtggggatcgagcctgctggtcggccgtcggcgtgaaatcggcaaccagatcgtcatcggcgtctcgcgtgggcgtatcgcctggcagttcatgctggagacgctattgctgaaccttgtcggattcgccgtaggcatggtcgtcggcgcgttcgcggtcaagccgctggccacgaagctcgccgacggcaatgcggtcagtgtgccgggcaacctgatctggactgtcatctggagcggtctcggcacgattgtggtcctgatggtgatcgccatgatccgcgtgctgctgttccgtgtcaggacgctgtttgcggcccgttcctcgaatgaggtcgaggtcgtggatgacggcgggacggacgacaccgcaacaagcgacaacgcagcgaacgacagcgatacggcagacgccgacgatacggcggaatcggcacaggagcaggcatgaacgacacgaacacgaataaggcggacgacatgaacgaggacgacgtcacactgaccggttccgaaggcgagaacacggcggtcgaatcagacgcggcagccgacgccacggccaacacggcaaccgaatccccggatgccgccggagcgagcgattcgacgacggtaccggacagcgtgcagttctccatcgtcttcgacgacgacggtgacgactccgacgccatcgtgatcgacgctgccgacgcggaaatcgacactaccgcggaagccgatacgacggtcgcgacggatggctccgccgaggaggcaccggccgacgacgagaagcccggagatgatacgcaggatgccgccgcgcaggagccggccagcgccgacaacaccgccgataacaccagtgccgataccggcgatgctgataccggcaccacggcggcggacaccgccgacgagaacttggatgtggcagcggccaacgccagcaaggtcaacgaaacactcaagctgagcaccgggggcaagacggccggtgatggccagaagaagaccagggccggcagggtcaccgtggcatcggccagcgtcgaccctgcaatgcgtctgtcatcgcgcatcgacaaggagctcaagcgcagcaaggcggacagcatccgtctcaagtcctacccgacgttctcgatgaacaaggtcacagtgaccgacaagaagtccggccgtcacgtgctcgaccgcatgacccaggcgttctatgccgggcatgtgtactcggtgctgctgcccgacaacgaccgcgtgctgcacgagaccctgatgggcgtgatgagcggcatcatccggccgcatgacggcaatgtgatgaacaaaagcgcgaacctgctggagcttgagcccggcgaagtccgtggacatcgactgggactggtgccgcagcagtatgcggtacgagacgacatgagcgccgaacgcaacctggtgtatgcgatggatgcctccgggcgcacgttcctcaagccgaagccggtgatcgcacgcgagctgctgcacaaggtccatttcgatgtggataccccgaacgctccggttggcaagctggacgtggtggagcagcgtcgcgtggcgatcgcgcgcgccatcgcctgcgaggccgaggtgctgatcgccgacgagcccacgggcgggctgaacgatgacgacagcgtggagatcctgcagctgctcacgtcgctcacccacggcgaccccaagcgctgcgtgatcatcctcaccgaatcagaagccgttgccaacatagccgaaaccatcatcaagctataaacggcctcatctgatacgccctcgctgggtgggcaggccaccgggctgtccacccagcgggggcgtattgattccacctagatcatgcgcatgtggaacctcgcggccagggccggcacgtcggggacgccgtactggtcgaccagatccagccagcgccgcttgttcgcctccccatagcgctccgcacgcttggcgtaggcttgcgcggtcaggaacttcggcggtatcgacttgctgttgtatttgtcggcgaccatcacgatttcctgttccagattgaccggcatgtaatcgaccggaggcagcggcaggttctgcgcgatgaccatctgctgggtcaggccgaccccagtatgattgcgcgcgaactgggcgatggactcgtccacgccctgctccagcaagtactcgtagccgagcaggccatgcaggatgtaacgtttcccgtcgaattgcagcggttcgccatcactgccgtcatgcttgagcacgcgatacgtgccgatgtcgtgcagcaggccgccgatcgtcgccagatgttcgtcgatcaggcgtttcggcacacggccaccggtgatgccgtctgacggcaggtcggcttgttcagctgccccggcggaatcgtcaagcgcgttgccgctgccctggcccagcttgttggtgaacagcgcgttctgatggcgggcgagctggcgggcgatggtcgccacgacaacgcaatgcgtgtgcaccaggtcataggcggcctgggagggggcgattttcttgtgcagctcgtcaatctggtcgagtgtggggatataaccggtcatacggctcattgtagccatcgcgacacgccgataacatcgcacaatcgcaaggtgcatttccgcagatcagccattttccggccttcatcataaacagcgatgtcgattgtgctgcgcaatccgggcgtgtcgcgccggtgaggaggaaaagaggagagcgttgcgagcaagttacagatgccgggtgccatcaatcgcccgatagacgcctctcagatggagcgcacgtggtattcgccggtacggttggacgccacgatcatctgatcgttcttcagcaccttccagccatcggactcgttctgctcgaagccggaactcgccacgaccacaccggacggcttgccgtcacggtcctgcacgtcacggtacctcatcacacggtaatcgtgagccttctcgcccttgccgtactcgtcgtaaatctcgacgatgcgcggcgacgtcttctcgcggccggcggcgcacaaagccacgagctggtcctggctttggatcatgcagttgtagctggacttggggtacgcctgacgcagctggcgtaccgcctgcgccacggcctcgtccagcgcgaagccgaacgcgatgtattcgaggatgaccgagaagaagatcgcggagtcggaacggccgccggtcgacaggaacgcaccctgattgatcgggtacgcgcggttgagcacgatgttgatgccgcggtcgtcggagatgtcgccgttgtggatgaagctcagcccgttcgcgaagaacggctgctggttctccagaatcagcggcaggttggagctggcgagacgcaggtgccacaggccaccgcgtgcggggtcgtccgcaaagtcacggaaaatcgggtcatggcgggcggccagtgtgctcttgtacagtttcgtgccggtctcgggcttgcgtacctcgccggcggcaaacggcagctcagtggggttcgacagcaacgcgacaccccaaccgtcattgtgaatctcgctgagatcccggaaatccgtcacctcgtgcatgcccaggacgtcgttgaggctcaggttgaatcccgatgtcgcgtatcccagtaatctgcacatgcttggtactgtatcgtgccgcggcggctgacaagcgggcgtggctataggagttccttatagcgtgcgcacggccgcgatgcgcatgcggtccggcacccgcggcagacacatgccgatacgaccaatacggccacacaaacggccgattgacgggcaagcgtcgccatcaggggaaactgccagaagaacaagcgtccacctgcccgctcgccaatcgcacaacagacgaacaggtataaggcaggtgccgccgcgccaactctcagtccgcacaggccaccccgaagcagccaggtccgcccacagatagagcctgcgcgatcccggccgtgccatataccggtatcatcaccgcacccagtgccatcattcccgcgatcaacaccagcaacgccgcacgatccatcagccacgtattcctgacggcagccacatcagccgcagacatgccaggcagcgaccacgcaatcatcgtcgcaggcacaagcgccgccaacgtcgcaagaggcagactcacgccggaaccgaccagtgcaggcaatccaaccgtcatggacgccaatggcagcgtaacaagctgcgcggccaaacacagtatcggcagctgggccatcctcgccgtcttcatgcaagccggcagcgttcgtcatccataattcagcgacctgataatcacgtgcctgcgtgtccaatatctcgcatctgttctgtgtggtgtcatacgtcagcagaccggacagcaggtacgaggcaatctcatcgccggacaactgttcactgtcttcagcgctgaacagccatgcagtatgatccgccggggattcggacaacttggcaggcgtcacatatccatttcgaccaagtttcccggacaagtcggcagccggctgaccggccaaacgcagaccgtgatgccatctcgccggtcacagacagtagaggtcgtccttgcgataaccggatatgcaccgaacggcagtaccagcggggcggctaccgcgacggtggcgcatagagcgactactgcgcagacggaacagccggcaacggtcctgtcatggctgcgccatccgacgaccatcgcccgtactgaggcggcggctggcgcaaatacgcggcacccaggccgtaacgcatgggcggtttgcctccgcagtccatcagtccatcaggagcgcacgcgagccggcagtgcggcccgtgtgcgtctactgcttagcgagtttcgccgaatcgtcgaccttcacggcatcatttttcgtcgcgtcgaccttcgcgcctcccttggcatctgcggctgcaggcttcgcagcgccgtccttcgcagcggcggccttctgcgccgagcccgcaggcttcgtcttgcttccgtccctcgccgcggacgcagccttcgtgctgcccgagccaccgttcttcgcggtcggtttcgcagccggccgttcttccggtttgctgacggtcacgatatcgttgacgcgcggcgtgcgcgaacgcaacgcgacgcgcttcagacgcggcggtcggcgagtggagatgaacagcggctgaacctcgaccaacgggttgaacggtgccaggccgaaccatttgatcggggagccggcgacgtgacgaatcgcgtacttggcctgcaacgacatcgcgcctcgcgtggagatcttggattccggcatcaggtccttgtgaatcagcacgtaacggatggtgccgatctccgggtcggcgtccaccttcgggtagacggacttctgctgcggcaggtcaccggaatccgacaggtcgtgcatgatctggtgcaggtacaccggaatagactgcgacaccttgaatcccagacggatacgcactcggaacaggtagctcgtgccgaaattctgcacggagtactcgcgcgtgaacggttcgtcggtggtctgcaccgacaccgcccaccacgcacgggcgcgcttgggatgatccgcgaagatcgagaagaagatgtccgtatccagtcgtcgcatatccgaatcgctggtcagatacacgatgttgtcggcgaaatacgggatgcggaagtcgccgtgcaggcggtcaagcgccggcaggaagtccttcggcatcatgtggcggcgctgcgcgcgttccagacgcgtgccctcgttccacgtgtacatgatgaacaggatcgccaacgtcagcagcatcgtgaaccagccgccgtgcaggaacttcgccatcgacgcgatgaagaacatcagctggatggcgaggaacacgatggtgaacacgaccgccagcacccgcttgcggtcgtaccacatgtacaccgccagcaggatcgtggtggtgatcatcgtgatcgtcagtgcaaggccgtaagccgccgaaatatgctcggaatcccggaatatgcccagcacgatgagcgtggccacgcacagtacccagttgatgacgggaatgtacagctggccgcgggtgcgcgccggataccgcacctgaagatggggcatccaattgaggccggtcgcctctgacaccatcgtgaacgcgccggtgatcagcgcctgcgaggcgatgatgccggccgtgaccgacaggatgacggccacatagcgcacgttcggatccatcatctggaagaacgggttcagtccctccatgtgctggtactcgggattgttctggttcttgaggatccacgcgccctgaccgaagtagttgaacaccagggcgaccttgatgaacggccacgtgaagtagatgttgccgcgtcccacgtgtcccatgtcggagtacagcgcctcggcgccggtggtcgacaggaacacggtgcccatgacggcgatgccggccgcgttgtgcgggctgaacaggaatttcacgccgtacacggggttgagcgccgcgagcacggaccaatcgccggagaggttcaccgcgccgaccacggcgaggaacgtgaaccacaccagcaccacggagccgaacacgcggccgatgctttcggtgccgcgcgattgcacggagaacagcacgacgatgatgaccacggtgatcatcagcgtcaggttgccgttttccttgaacagcgcctccaatggcggcagcgtcttcagaccttcgaccgcggagctgatcgacacggccggggtgagcacggaatcggcgaggaacgccgcgccgccgagcatggcggggatggcgagccatgcgccatgcctgcgaatcagcgaatacagggcgaagatgccgccttcgcccttgttgtcgatacgcatggcgatgagcacgtatttgacggtggtgatcagcgttatcgaccagaacaccagcgacagcatgccgagcacggcctcacggtcggtgttggcgatgccgccctggccggaaaggaacgtctgcgcggtgtacaggggcgatgttccgatgtcgccgtagaccacgccgagcgcgacgatggccatgccgagcgagatcttgttggggccggactgcaatctgcgccaccagcggccgatcgcgcccttgcttgcggtcttggcgagtttttccgcttccttggtttctgccgcctgctgctttgcaagctcttcgcgctcctctttcgtcagtgtgcgacgggagactttcgggacgttggtgaacgtgtcggcacgtaacaacgtttcatcgggcttttgagccatgatgcttcctccatcgacggggataatccgcacatgatatccgcatattctaggtacagctactaacggaaaccttggtatttcaaattcaagcggtcagtatatgccccttttcggttttttccaacttggggaggacgccggccgcccttgccgtccctcgtcacaccccgtataccgtgcgtgtcgtgcgccgcgtcgcacgcgcgacttcggcgacgggcaggtcgaacacgtcggcgagcgccgtcagcgtgtacgggatcatgtacggcgcgttggtgcgcccgcggtatggcatcggcgtaagatacggcgcgtccgtctcgaccatgatgtggtccagtccgaccagccgggctgattcgcggataccgtcgttgcccttgtagctgaccgtgccggagaagctcagataccagccgttgtcgcgcgcgatctcgcccatttcggcgtcgccggagtagctgtggaacacggttcgctctgggctgccgtctgcgagcagcgtctcgatgacctcccggtgcgagtcgcggtcgtggatctgcatgggcaggttcagctccttggcgagcgcgatatgctcgcggaaggcgtctcgctgcagttccttcgcgccttccccggtgcgaaacaggtccatgccggtctcgccgatggcgaccacctgatgcgggtatgcgagggccaggcgatgcacttcggcgagcgcgtcgtcgaagctcacgtcatggtggggcttgtatttcagcgacagaccgtccggtccggggacgccgcggtgaccgtggagcacggcttcattggggtggattgcgatggcggcatgaacggagtcgggatggtcgacggccatctggatggcggtcatgaggttcggcagctcgcacccgcagtcgatgatgccggtgacgccgactgccgcggcttgggcgagcagctgctccacgtcgtacaccggtacttccggctgtcctttttcgacggcttcgtggctcatggcccgcgcaaacggaatgacggatgccacatgcgtatggttgtcgatgacgtgcgcgtcgtcgggcagcggcgacggcgcgggcgcccagctgcggtcacgatgatgatgcttgctcatgtctcaccagtgtagcgagcggcacggcattgctgcgcggccgttcatgggtctcgcctcgccggctaccgccagcagctctcgtagggcagaccggtcagtcgttccaccacatgacgggtttcgggcgtgacgtcgaccttgtcgccgccgttgcgcaggcgggtgatctctgtcaatacgatgccgtccgtacgcttgttgatggcgagatgggcggacacaatccagcagatgaccatcgcgacggcaagacggtaaaccagcccagcagcacggctcccaatccaatgcccgccaccgtcgtctgccatgcgcgcgtcgcgtcgaagccgaccgcgcccagcaccaggccggcggcaatcgtcgctattcccgagcccagctgacggaacgatgcctgaatgccggagaacgtggcggaacggtaccggcgagtcacgatctggtcgatgtccgcgatgtacgggaacaccgcccaccacggttccggcagcgtgccgaccagcatccacgccgcgaacagccaggccgtaccaagccagccgatgaaattgatcgcgtacagccgtttcgggcctatcttggtcatcgcccagccgaacaccggcatcagcgacgcgaacgccgccgtatggttccagtcgtgcaccacgaagaacacgaacgtctggccgaacacgtccatcgtcacctgcaccagaaggtagatggccagatgcttgcggagctccttgacgcgcagcgtgctcgcatactcgcgcaacaccagccgtgcacgccgcagccagcccaccatgccgacgtgcccgtcacgcttctcgccccacgcgtgcgcgccgaatccggcagtctcaggcgtcatctcccaggtacaccgccagcaggcgaacacgtatatgccgaacggcatctccggaatccacaggaacacccccagcaggatcatcggcgatatcatcatcagcagcagatggcgtacggccacctgccccagctgggcgcgcggaatgcggatcgaggtgatcggcggcatgaccaccggggcgatcagcgtgttgtcgaatccgatcaccgacacatcaccgggcacgttcacgccgtcggcggtgaaccgcagcacgatgcccaccgcgatcagatcgttgtaggtgatgatggcggtggtgtccccgccctccaatgcgagcgcggcctgatagccgccctcgactgtggggtgcaccgggcctatctgattgaccttgaatcccatgcggttcccgatgtcatgcaccgcggcccacctcgactgattggcccatgacgcggccgggccggcgacgtacgtgaccgcggtgtgatggtagtgtttcagcaggctcagcgcgcacggtgccgatgcgcggatcgggcacaacgctggccacgccttcgagaggacggttcagcacgaccagcggcacgcgcttcgcatagtcgcggatgaaactgatgctgggcgcgtcggtggacaggatgacgccgttcaccttgtcggcgagatggtcgagcatctgctgtgtgcgctgcccggacgaccccgtttcgatgacgctcaccgcgctgtccgattccatggccgtgacctgcgcccctttgaggatctgcgacaagacgccgtcggcagtgtccttgaccaccagcgcgatgatgctgccggggaggccccgaacggggagaacggaggcggtgcgctcgcactgccgaccggcacagacgaccgcgaggccaaggccgcctacacgttcgcgcacagcgacggcgtgaaggggaatcttgcgcaggagggcattcctccgctgaaatcgacgctcggcgacccgcggcccagaccgatgatttcttcggagggcagaagccccacgccgtcatcgcccaggcgtccaaggacgtgcgcaccgacttcacgtatctgtcgtacacggcgtacgcgaactcgatcgccgtggattccatcggccagtcataccacggcaaaatcaccttgcacgaggccctgcagcagtggggcgaatcgctcaagaaatatggagaagagtaaggcttcaccgtacggtaggccgggtgccgacccgaacaatgaaaggaacatcatgcaactgttgtggtcgcgccgcccgcacgatcgaaatcccttcataatccgccgtgcgcggcagtccgacatccagcccctgatgcgacacgcccggattgcttcgcacaattgaagcacggcattccggagaatggcggaatgccgcgaccctgtgaacgcagatagacgattgtgctacgcaatccgggcgtgtcgcgtcaggggttggatgaaaggccctcacgctcctatccgataggcgcaaccacacaccggaaaagaagaacccggcggggaagccgccgggtgagagaagagagagaagaaggggttcaattatggggtttcaacaacctcgccaacgttgtaacaaccgctgacatgttctatataaccgcatcatgcttggaggaatgatgcacgttcctcggaattatctgtgagatgtgtgcccgacttgtgagcatgtagtcacatcccggcacaatgtacggaaaaccggccaaaggcaaggaacatggcagttcttcgccggtaacaaccctccgtcactttgcggcgggctgagcaaacggcagagctgtttgtagacggaggcgatccgacaggcgagcaagtgggctgcggccgaaggccgtccccaattgcagggcccgaatggctgtcgcgtagcgactgtaccgttttgcccccgctggcggggggggctgtcgcgtagcgactgggggtggtcaccggtcgtcgcaatcatcctctgcggccccacccgcatccacatcctccccaactaccgcagccgggttcgatggcagcagcgaccacgcgtacgacacctgatactcataatcgctgccgcgccgctgctcgctcagccgcaagtattcgtccagcaggccattgatacactgctgcacgtccatgagctcgtcacgggtcagcagcagcgtcccggtggtcatcggcgtgaaggggaattgccgacgtctctcagtgaggggtatggccgcgccagcttccatgacaccgttgatgcgcatgcgcagcgccttgagcgccccgtccatgaccctcatgcgcatggcttgctcgctaacggccatgctgaagaattccgcggcgggcgcgaacgactgtttggcaccagagggtgccacatcggtcaggtcgacttgctcgccggccgtgacaccggtactggtggcggccgacgccgccggtacttgcatgatgccggtcatcgcaacacatgcgatagccgccaaaacgcggaaccattatttgtgcgccatgcttctccttgttattcttcaatccccatatatgaaagacgccatatcacgacgtcacttccttgcatggctgtcagttgagcataatatacgaaaaatatttcctattttctaccgttgctcacgcatcggacgaaaaatccccctgacattcatatgtcagggggattacaacaaagcctcaacagtcaacggcccttgtcagcgcctagatttcactgcttgagttcggcttgggccgcggcgaaccgctcagcctcggccttcttgcgggcggcgagctcggtgtcgaagcgggtgagctcctcggccacagcctcaggcggaattttcgcgaaaatcggatgcggcttcggcaccggagtgccggccaccagacgctcactctcccacgggtgcacggtctcaccgagcttgtagtcgccggtgatgatcgggtacgtgaagcccggcttgtcgaggtcttcgacctcttcaaggcgcggcagcggcgagaatacgcctgagccgcccagcgcctcgtagaccttctgcgacgcgtgcggcaggaacggcgccagaaggtggttcgcgtcgtacaccgcctgcgctgccacatgcagcaccgtgcccagacgagcctcgtcgtccttgatcttccacggctcctcggcggagatgtacttgttgatgtcgccgaccacgcgcatcgcggcgaccagcgcgttcttctggtgatgcttctcgatcagcgcgccgatctcgtcgaacgcgtccgaggtctccttgagcagcgcacggtcctcgttggtcatcgagtcctcgtcgagcgccgggatctcgccgaagttcttgttgatcaggttggcgacgcgattgaccagattgccccagctcgcggccagctcctcgttgttgtggcgtacgaactcggcccacgtgaagtcggcgtcggaggtctccgggccggcgatcgagatgtagtagcgcacggcgtccacggggtagcgagcgaggatgtccttgacgtagatgacgatgccgcgcgacgagctgaacttcttgccctccatcgtcatgaactcgctggccaccacctgctcaggcaggttcagcgggccgagttcaccggtctctccgcccttggaacccttgccgttgtaggcaagcatctcggagggccagatctgggagtggaaggtgatgttgtccttgcccatgaagtagtaggccgggcagctcgggtcgttccaccactcgcgccacttctccgggtcgccttggcggcgggcccattcgatggaggccgacaggtagccgatcaccgcgtcgaaccacacgtacaacttcttgttcggattgtcgatccatcccgccaccggcacggggatgccccagtcgatgtcgcgcgtgatggcgcggggcttgacttccttgaacaggccgatggagaagttgatgacgttggtgcgccagcccttgcgggtcttgagccacgcgaggttcgcctcggcgagcgccggcaggtcgaggaagaagtgttcggtctcctcgaagcgcggggtttcgccgttgatcttggagacggggttgatcagctcgtcggggtcgagctcgttgccgcaggcgtcgcactggtcgccgcgggcgccgtcggcgtggcagatcgggcattcgccctcgatgtagcggtccggcagcgtgcgtccggtggacggcgagatcgcgaccttctgcgtgcccttatagatgtatccgttctgcaggcactgcttgaacagctcctgcaccacatgctcatggttgccggtggtggtgcgggtgaacaggtcgtagctcaggccgaggtcgcacaggtccttggcgatcacgcggttgtagcggttcgcgagctcctgggcggtcagtccctccttctccgcctcgacgagaatcggggtgccgtgctcgtcggtgccggacaccatcagcacgtcgttgcccttcatacgctcatatcgggcgtagacgtccgagggcacgccgaaaccggcgacatgcccgatgtgacgggggccgttcgcgtacggccaagcgacatttaccaaaacatgactcataaatcccgattatccggctcagcggggacaccgcggcgtatccacagcattatccacaatgcggcgtcgcggaacgtgagttatgcacatatccacagatttcgccaggtcggtggcggaccgccgcatcgtatggttatggtcggcgtatgaacagaatactgccttcggatatcagatatggagtcgcgccggcgcccgaccagacggatgtcgctgaagcggcaaaagtcggcaagccgcagcccaacgcgacacagcccgacacagggccgcccagcgcaacgcgacccactgcgacggcaccaagcaagactcagcccggcgcaacgcggcccggcacggagtcagccggcacaatcagccgcagcgacaacgccgtcgcaatcgtttccgacctcatcgcgcgcggcaccatgccgcgtatcgacaccacgccactgctcacccacaaggaccttcccggtccgctcagcatggctcggctgacgcatttcggcaccctgcactcgctcgaccaaaccaacgcctacagcgccgagcacgccgacaccctgtacggccgcgcgatgatcgcgctgaaactcatcccgttcgggacgatcgcatgcgcgctcaccgccgcgtgggtatggctcggcggcacgttcccacgcacagtcgatgtcatatccagctcccattaccgggcggattcgcacggacggaagattcgcgtcttcaaccgcaagacggctcccgagcacgtcatacaggtcgggaacctgcgcatcaccacgccgatgcgcacagcctgcgacatcgcgctgctgacgccgggagagctgaacgagcacgacgcgtgcgacgtgctgtgcgccttgttcgaggagtatcaggtcagtcttgcgcagtgcatgcagacgctcgatgacaaccatttctggccgaacacccaaccggccagggaactgttcacatcgatgaagcatttcttctgattgcaagctgtcgcggggccgcatcggcctcccgtccgactcaaccatcgacacggctcaccgccacgacacatcaacacgacgcatcaacacgacgaaaggagagccacatgcgaatgccatcacaggagaagacattgcagcgactgcagaatcccgcggagacgctgtgcgagcgtccccgcgcggggacggccaggcaacggcttcggcacagtcaagccagacgagccaaacgcaagagcattcccggcagacggatgcatgctctgcaacggcgtgaacaggcgacggcgtcacggcggtcaacgcgggcggctcctccccctccgccgctcagactctccccgctgctggcgtgcgatcccgcgaccgcgccggaagtgctctggttcatcgccgagcatgagccggaactgcggcgctggctggtcgccaatcccagcgcggacgccgcacttctggaatacgtcgcgcaggcgggcggccccggcgtcaaccgcgccctgaccatcctgctcgacggtctgccggcggcataagtcaggatttcattgccagaacggccgtatacacctgcttgcggttcggcaacgagccatccggcagcggatgttcggcgaccacctgcgcgatcgcgtctttgatgcgcacgccatcctccagggcacggtcgatggccagcacggccagatcgtcgatgctcaacgtcgccggcgcggccgcctccgcctcctcatccgacgcgccgccaatcaccagcaccatctcgccgcgcggcggattgtcaacgacgccttggcgtatcgtgccgaccatgccgcgacgaatctcctcataatccttcgtcagctcgcggcacaacgccatcgcgcggttcgggccgaacgcatcgagcaggtcatccatcgaatccgcgatgcgatggggcgtctcgtagaacacgatcgtgcggcgctcggactgcagcatgcgcagatgctgcacgcgttcggagtgcttgcgcggcaggaacccctcataacagaaccggtcggtcggcaggccggagagcgcgagcgcgtcgagcacggcgctcggtccgggcgcgcacgtgaccggcagcccacgctcgatggcccggcgcacgatcgccagtccgggatcgttgatagtcggcatgcccgcgtcggataccaccagcacggtggcgccggtctccacacggtcgagcagcccgtcggccttggctcgctcgttgtggtcgtgataggcgatgaccgtgccgttcacgtgcacgccgagtcggttcgcgaggtcatacagtcgccgcgtgtcctcggccgcaacgatgtcggcgtccgccagcagcgccttcaaccggtcggaggcgtcgcccacattgccgatcggcgtggcggcgagcacaacggtgccgctcggcaccatgaccgtccgcggggcggccttcggctcggtggcttccggtacagtggcgtccggcgaggcgccctccggcacgacttgcgaatcatcttgcacagtatccatggttcccagtatcccgcacgccaagtacctgacgaccacccgttgcgttcttaagtgcgcgccggaacgacaagtgcgcgaacataggaacgcaaatgaccctgtttgcgtacctaagtacgcacggtcgtcgtttcagtgcgcacttaagaacgcaaaaccgcctatccgcaccgctatataccgcatctcccctgttacacccccgctggtatggttcttagagttttcttaatggaattacaccattgatagtgacgggaattttcatgggtttcgttcatttcatcgtcaatttgctgaaggaccctcgcggcgcaatcgccagctggattgccatgggcaccgcacctgcgctcggcttcatctttctcatcgtattcattgagacgggcgtggtgttcttcccgttcctccccggcgactcgctgctgttcgcagccggcttcttcgccgcgcagggcgacagcgggctgccgttgatggcactgctgcccatagtgtggattgctccgatcctgggcgatcagagcaactacttcatcggacacttcttcggacgccgaatcatcgcgtcaggcaaggtgaaggccatgacgccggaacggctggcgaaaaccgagaagatgatcgaaaaatgggggccactggcggtgttcctcgggcgtttcttcccattcatccgcacgttcatgccgttcatctccggtatttccggcatgcgctggagccggttcaccccgttctcggtgctgggcggcctgtgctggtccacgctgttcacactgctgggattcttcttcggcaacatccccgtcgtgcagaagcatttcgaattggtcatcgtgctgattctgctggtgtcgctgctgccgaccatcatcggaccgctcaaggcgaaattcggcaagaagcccggtaccgcggcgaacgcatcgagtgtggcggccggcacgcagaacaagtaacgcgaccggccactcctgttggccgcccggcctgcctgattacgttccgttgcgtcactgtgagggttcacccagtgacgcaccccacgcacagtgacgcatatcagcccataaccggcacccaattttcacacacgccggcttgcgtttggacatgggtcgtattaatgtgtattgagttgtcctgcgaagcaaggcaacatccaaggggctgtagctcagttggtagagcgcttcgttcgcatcgaagaggtcgtggtttcgattaccatcagctccacgaaggccgattccattccaccgggatcggcctttttcatttttcgtccccgatgaccatatgcccccgctggcgggggctgtcgagcacagcgagactggggggggtctagggccgatacggtaaagaccgccccagtcggctttcagtcgacagccccgccagcgggaggaagattcagcgaccgctggtggttcaggagccgaggcgctggcggatgaaggcattcagcgcttcggcggtgatgccggcgaagccgtcgatggaggcgcattgcggaccgtcggctttggcgttgcggttgaagccgagctgggcaatggtcgtggctccggacgcgacagccgaggcgatgcccgtggccgagtcctccaaagcgacgcacctcgcgatgccagggagtgccgcggcaccatcggctccggccacgcccgtttcgatgccgagcatcttcgccgccgccagatatggagccggatcgggcttatgcggcaggtcatcgtcaccgcagacgaatccggcgaacgcgccggccggcgcatgatcaatcacgttctgagcgagcctgcgcggcgatgtcgtgaccagcacggagggaatcccggcattgaccagcgaccccagcacgtccagtacgccattcgtccaaggcaccctctcgaactccttcttggcgacgtaatcgaccatcgccttggcaatctgctcgggcggcagattcgtcccgtgctcgatcatcgttttcgcgcaatggtcaagcggagtgccagaacaggaccacgctagatcctcatcccaatacccgccatgcgccgcggcgatctccatctcgccctcgtgccagtagggttccgaatcgatcaacgtaccgtccagatcccagaacacggccttcaacaacatgtcactcatgcacaacccaccttgtattgacgccaactgtatgcctgcatgcccagcaaccgggctttcgttttcattatcccagatgacctcgaagagggcgcctgattcttgacgtccattttcttgacgtccattacacgctcatgactcagcaacgaccatacttcgaccgaggcaacccgcaatcagcgcaaacgaaagcgggccgctggcaggatttccgccaacggccctcaagaccagtcaaccgattcggtacgggctgcggcaatcagtcgaaatcgaaacgaaccgttgactgccgccgcccagtcgagagacttaccgattcgcgcgacggcgcagcgacagcgtcacaccgcctgccgcgagcagcgccgccactgcggcaagaagaccgaacacatccgcaccggttttcgccacagcgtccggggtcggcttctgcacgtcgccggcaccggcgccagtgccgtcaccggtaccgtcaccgtccggcttttcgctcgggtctggagtgggatcgggatccggcccgggctccggctcctcgacagccgccagcgtcgccgtatatgtcacggtcacggcgtccgcgccctccggcacgttcgccgaaccgaccacttcataccggtgcgccgccgtatcgtttacggtcacgtcgatgccatccgcaagcacatccgcgggcttgaggccgtccgcgaccagggtccgcccgccgtcctcgccgatctcgtagacggcgtagctgtcggcgaccaccagcgaagccgccgcaccgatctgcatggtgtcgatgtgcgccctgtcggtgccctcgacgcgcccgaccggcagctcgccaccgttttcactcgctccgaccaaagtaacattggcggtgtcgtacggcagcgacgcgatgcggctgcctgacacgttgctcgggtacaggtcgagcgagcgcatcatgaatcgcgcgtaaccgagatgcccggcgtagttgagctggccggccttgttgaaccacgcggtcttgacgctcgcgtcagcggcgacgaccttgccgatccacgcctgcgcgtcgatgagcggcaaatcgtcttccttggccaccgtgcgcatagcgccggcatactcgtcttccccgccgcgcacggtgaccggcgtcaccagcacgaccttggcgcccgcctccttcgccttggcggccacggagcgaatatgcccggcgaacgcggcggcgtcgctttccgcaagattcccgtcagcgtcatacaggtccggagccaagaagaggatgtccggcgaatactcgcccaccatcgcagcgtagtcctcgtccatctgcttggcagttagaccgccctgcccggccgccacgaagaacttggcacgctgccgttcgcggtccgtggcgctcagcccggtgacgtattcccagcgcacgcgctcgtcgagcagctgcacgatgttcttggcaatcagatgatccgtatacccgccttcgatggtctcgccacccacgaacacgatatttttgcgagcaccggtatcggagatgatcggatgcaacgcgttcaccgccgcatcgaccttcgtcaccgccacggcactggtttcggcgctgattcgcttggcttccgcatcggtcagtatgcggctccatgcggcgacgtaatcgacaatgccggtgagctgctgcgcaccgccggcgctgtcggccccgcggatcgcgccggccgtggccgcgttcaccgtgatcgcgcccggcacgttcagctgagtgcccgcgccgccgctgatcgcgcgcatcgcggctccgtcaacatagatcgtgaagccgttcgccacgaagttcacggacaccgtatgccatgcgccatccgcgaggtcgttcgtgccgaccgtgtagaaatcgccggtgttgccggagttgaggaactgcaccagaccggtcgcgctcaggcgcacggtcgcgcgggtcgcggagccggagtcgcccagcgagaacagcgtctgcggctgtccggtcgccgacgcacggaaccggatggtcacgttggactcccgcttgccggccacagcgctcaccacatcgccgcccaggtcaacgtactgtgcgccggagaggaacttgcccacggacttggccgcggccggggcgggttcaagcccgtccgagcccttcagcccgttgccgtcggcgttcaccgtcacggtcggcttgtccagtgtcgtgtcggagctgctccaccgggcaagcgggtcgtcgttggcgatcatattgagcgctcccagcgtgaacttggcccattcgatgtgcccgttctcgccggggtggatgtcgttgccggcacccatatacgtgccggattcgcggttgccgccgccgagttccagccactgcttgttgaagtccaccagcagcacgttcttgtcgagcgcgagtcgacgttccgcgtcaaagtacgtgtcgaggttggcgttgaacgtcgtgttggtcgtgtagttctgcgtctgcagcaccgggatggcgccgaggtcgcggatcttgtcaatcagtgtggacaggttggcggtgtactggtcgacggtgaacgcctggcctgtacgcccgtcgttcatgccgaacgtgaggaacacgacgtcggggtgcttgtcggacacccatttctcgaatgcgccgtccttgagcggccaactggcgtccgcgctggagatgccggtgttcatgaccacatcgttggcgcgggatacaccgcgcaccggcgtggtgtccagatggttcgcgaacagttccgaataggtgcggtagccacgcgtgaactgcacgccgtgcgtgatggagtcgccggtgaacagccagttgatgcggtcggtctttgcgagcttttcggagagcgtctgccagtcggcgagcgcctcgttgcgggtcttccatgcggcgatgtccgccggcagttcgaccggctggctcacggtgacggggtcaccggtgatggacactgattcgagcaccgtctcgccgctcgcgtctgcggtggcgtcgatggtcgcgctcggcgtgaacgagccggccgtcgcgtccgcttccgtcaccgtgtggtaggcgagccgcttgccgttgccgctgacgcatgcaccggtcgttcccggatccaacctgctccaccggcatacgggtgcggggttgctcgccgactgcggggtcgtcacgccgtccagattggatttgcgcggatagaccgcgaatgactgcgtgccgacgttctcataggtgatccggtaggtcagcgtgtcaccgaccttgaccgggtctccgttgtcatcggtacgttcgatggtgagtttgagccgcttggctgcgggatccaggtcggtgacagtcaccgccaactcgccttcggcgaagctgtgcagcgtgtcttcggactgcgcgtacttgccggtgatcttcatcgtcgctttcgcgacggtaccactgacagccgccgcaggcacagtcaccggaacgttcacggtcgcgctctgaccggcggcaagattgccgacgttcacggcttcggcgctccaaccagacggcagacctgtgggggtcacggtgacgttcgtgtagtcggtcagaccgtcgttggtgacggtgaccggcgcggtcagcgtaccctcgccttccttgacggtcgcggtgccgctcgccgtggcggtgagatatcccagccattccatcgacgcgcgcgtgtaggtgatgctttcgccttcgtacagcagaccgtaaccaccgccggcggcgtcgttcagtgcggtgatgaccgagtaggccatcgagccttccttgaacagcttgccggccgaccatgtggtgccgtcatcgaatgaaacacgcacgacaccgttcgcacggccctcgttgctcgcacgcggtgccgaatacagcagcaccttcgccttcgccgaaccttccggagcgttcgggaacgcgcgcgtgatctgcgcgttgttgttcggatccggcagctgggtctccgacttgatcggaccatagttcacgccgccgtcctccgagatcgcaacgcgacggtatcccgccgcgcccggacgggaattgagcatcacgcgaccgtcggacagctccacgaccttgttctcgtccatgttcgcttcggtcacggggttgccggccttccaggtcttgccatggtcgtcggaatacacggacaccgcgatgttcgtgttgctcgtggtgcgcacagcgtattgctgtatcaaacggcccttgtactgcccgtacttgagctggatgccatggccggaggatgcgaaacgggacttccactcgtcttcgtgacccttggtgatgtctttggtgatgttgcgcggctcgctccatgttgcgccgttgtcgtcggattccatgacgacggcctgcagcacgttgcgcgcatcttccacacccaatacggagccaaagtagccctgatcgtacgatttcacgcagaacaggaagatcttgccggcttcctcgtcgaccacataggacgggtcggagtagccgtatttgttggtggcgctgcgtccctgcgccacgtatgccagcgtctcccatgacttgccgccgtccttggagatgcgctgcacgatcgagttcgggttgggcgcgtccgccgccgatttcggccgcaaatcccatgcggcgagaatccagccgttgggtgcctgcgcgatggcggggatgcggtagtaatcggtgttgccgatctgcttgttggtcgccagcaggagcggttcgccgtctttgcgctccgtcggcgtggacgcggcgtcgtcggccggccccgcgacggtcaccgtgccggtggtgaacgtcatgtcatcttgcagcacctgcgtgccgtcgcggtccgatgtggcgcggaatgtggctgtcggcgtgtatctgcgggccacgacgtcctcagcggtgatgacgtgataggcgaacccacatgatgcggtctggttggcctccactccggatcggcagctgttgctcggataggacaccacgtccacgcgttcgatgttcgactcgctcgggtaggcataaatcttctgcgcggttttgttggtgtaggtgaagttgaaggtcagccggtcgccgatcttcacattatcgccgagcgtatcggtacgctgcatggcgacgcgcagtgcggaggtcgcagggacggccggcaccgtctcgccggtgatgtcgacgctttgcagaacgccattggtgccgtcctgagtggtcgccgccacggtcgcagtgggcgtgaagccgtttgcgacatcgtcttcggtcaccacatggtaggcgaactccttgctcgcgctccaagtgcatgcagccgaagcacccgccgcgagattcccccaccggcacatgggattggggttgcgcgccgactgcggcgtggcgacattgttgaggttcgacgccgtgggatacacaatgaaaccggtatcggaaacgtttttgtagccgagactgtaggtgagcttgtcgccgacttcggccggggtgccgttgctgtcggtgcgggtcagggtgagttgcagatattcttggggtgtttcgtccgccgcatttgcgctgatggtgccagccggcagcactgccagcatggcgatggccaccagcagcccgctgagcttgcgcatcagcgtttttgccgtggcacgtcggaatattgtggtcatatcgagtctctcttctctgcggcaggtcagcttccggaccgatacgggggtagcagcgtcttcttcggcgctgtcggcttctttaccgcatgatttttatgaactatcggttatatgagaatcacagcgatacgctgaaatttccctcattgtagtctacagagtgaacgaattacaacatgaaaaagcccccgtgtttcgggggcttttcctgtatgccgtcactcatcggccggacggtttaccgccgcggcagtgaggtctcggtcagatcagtgagcggagcggcggcgcagcgacaacgccgcgacaccggacagcgccaacaagacgaacacgatggacatgcctgccgtggaagcgccggtcttggacaggccgggctgctcggtgggcacgtcgaccttcgggccggccggcttctccggttcgggcttgggttcgggttcaggctcgggctcagggtcgacgctcttctcggccacgtcaatcgtgaacgatgccgtcaacggattcgcaccctccacaggcacactcaccgtgaccgtcaccacaccagccgctgcgaacggctcagccaaatcgaccgccttgccgtcagcatccacagccgacagcgaatactcgccggcagccagcgccttcgacgaaccatcactcatcgccgcggtcaccgacaccttcgacgcatcaaacacgtcaccgaccttcacaccagcctgcgacgtcaccgccgaaacaccggtgatggtcggctccggctcaggatcgggctcgctcttttcggtgacgttcaccgtgatggagccgtcaaagccggtcgtggcgtcggcattcgcagcggacgtgccggtcacgcgcaggacgatcttggcgacatcgtccttcttggcagttgcgggaacattcaccgtgacggtcacgtccttggacgcgccgctggcaagagcgcccacgttcaccggagaggcagaccagccggtcggcagatcggccggagtcaccgtcacgccggtgtaatccacagaaccgacgttgctcaccggaacggtcacgtccaccgtgctggcaccctcttcaaccgaagcggtcacgtcgtctgcggtggcggacaggtagccgagccaatccatggaaatgtgcgtgtacatgatgtcgtggctgtcaatgccgccgccggtgacccaagcgccttcgtacagcagaccataaccaccgccagcggcaccgctcagcgcggtgatgaccgagtaggccatcgagccttccttgtacagctttccggatgaccacgtggtaccgtcatcgagcgagatgcggaccacgccgttcgcacggccctcgttgttcgcgcgcggcgacgagtacagcagcaccttcgccttcgccgaaccctcgggagcgttcgggaacgcgcgcgtaatatgcgcgttgttgttcggatccggcagctgcgtctcgtttttgaccgtaccgtagttcacgccgccgtcctccgaaatcgccacgcgacggtaaccggaaccgttacccgggcgggagttgagcatcacacggccatcagacagctccacgaccttgttctcatccatcagcatgcccgtcaccgggttgccggcctgccaagtcttgccatggtcgtcggagtacacggataccgcggcgttcgaaccggtcgtacggcccacggcatactgctgaatcagacgacccttgtacttgccgtacttgagctggatgccggcaccggaggtggcgaaacgggacttccactcgttctcgtaacccttggtgatgtcagcggtgatgtcacgcggcttgctccacgtctcgccgttgtcctttgagctgacgacaaccgcatgcagcacattgcggttgctctcatcgacgccaagctgagagtcggcgaagcccttgttgtacgagtgaacgaagaacaggaagatctcgccggtctcctcatcgaccacataggatgggtcggaatagccgtagcgttccggggcgttcttgccctgcgcgacatattggatcggcgtccacgacttgccgccatccttggagatgcgctgcacgatggagttcggctgcggggcatcccagcacttgacgccgctgccgttggccatcgccgtattgggacgctggtcgaatgcggcgaggatccagccgttgggcgcttcggcgagcgccggaatacggtagcattcggtaccgaggttctggcgggcggtggccaggcgcacggcctcgccatcggcacggtctgtggggatggtggccggatcggggcgcttgccttccttcacggtgacggtatcgccggtggagacgatgttgtcttgcagcacctgagtgccccctcggtcagaggtggccttccacacggtacgcggggtgaagctgccggccgtgagatcatccgcagtgatggtgtggctggccgtggagcaagggtaggaagcgcctcccgcaaggttctcataacggcagttcggcgttcctgtggtcagcacaccgctcagattcgactcggcggggaatgcggtgaatgccgaactcgtgttgttggtgttggtgaaactgtaggtgagcgtgtcaccgacatatacctcgtcgccgagggcgtcggtacgcgtcatcgtgacggtgagcatgtcagcatcatcgctggccgcactcgcggtggatacccctgcgggcagtaccaccagcatggcagcagccgccaccagcgcgccaagacggcgcagcagcgatggcttggtcgaacgaaccatgtgtgttcctctcctgtgcaacgccgggtcacgactttgggccccgaccgccgttccacctataggacggcatggcttcctcaccatcgagcgttatttgtatagtatcttgctattcaatcttcattggcatagcaaaatcgctgtcgggtacagtattatagcctacattgtgaacaaaatgacatacaattgtctgcgattccgtatcacccccccacttcccatccagcacccgcccaaagtcccatccgacaggaataaaacgggacgatggcgggatacaagacgtccccatacgacaaaagtcccatccagcggatgccagatgggactatgacgggatgacggccgcctattcgcgaccggatgtgatctgcaacggcgcgatatatgcgcgcccgcgccgacgcacatgatagaacggcgactgccgcacctcgacgacttcaccatccataccggtctcgaacacgctatcgccgtccagtcgacggcgaagatgccgaatctgccggcgcagctgcctgttctcctcctgcaacgaaagaatatgcgtgacgcctgcgagattgataccctcgtcctggctcaactgctgcgcctgtgcaagacgcgccacgtcacgaagcgtgtagcgccgcgcaccaccctccgtgcgctgaggcaccaccagaccaaggcggtcgtactggcgcaacgtctgtggatgcacgcccgcaatctgagccgcctggctcaccgtgaacaccggcatctccacgttcaggccgagcgcgtcgattgcatcgagatcaacgccgccggagaccaacgccgcggcgcaagcagcatacgcacgcctgacttcctgtgcgattcgcgccatgatcatcatctccttaacgttgattatcggctgcggggtgatggtgaaccgcccccagtcgctccgcgacgatgcgagatgccgccgggaggattaccgctcggcggcaaccgcttcggcgtagccctcgacggacttgtcgaattccttcgcggcgtgcttcgcgcccagacccggcttcgcgggcacgcgaatctgcacgcacccaatcaggtcgccggcagtggcggactgaacgcccttgccgctgacacggatctccgcgccactggacgagcccgccggcaccttgaacgtgacggtctcgccatcgatgtcatgcgcttccacgcgggcaccggccacagcctcgcctacggtcaccggcacatccatgacgatgtcatggccgcgcatcgtgaaccgcggatccggcttcacctgcacggtcagatacatgtcgccgttcgcgccgccgttgctgcccggcctgcccttgcctgcgatacgaatcttctgcccgtccttgaccccggcgggaatatgcgtcttgaactgcttgccgtccacgcgcagcgacacggtagcgcccttgaccgcctgacggaacgtcaacgtgatcttggacttgcggtcatcgccgcgctgcggagtcggcggctcctcatacgggttaccgtaacgcgaaccgccatagctcgcaccgccacggccaccggcagccccgccgaacatcgagaagatgtcgttgagattgctcggaccgccgccggacgtgctgaagcgcacattgccgccgttgccgccgaacatcgaaccgaagatatccgagaatccggaagcgtcgaacccgccctgaccggagccgccagagaaacgcgccccgcccatgccgaactggcggatcgcgtcgtacttctgccgctgctccttgttgctgagcacgtcgtacgcctcggagatgtccttgaacctctcctcggcctccttcgtcttgttcaggtcgggatggtatttgcgcgccagcttgcggtacgctttggtgatgtcatcctcggtggcgtccttggagacaccgaggactttgtagaaatccttgctcagccattcattctcagccattcaggtctcctttcgtgtatgcgtgtatgtgtgtcgtatgttgtttttctgttgttgcgtattggcgttcgtcaccgcggaggtcgacatgtttgctgtgaccggagcggagacgacggtgatgtgatcgtgtctgcggtcaacgcgcgaccgtgcggagttttgtcgcttggggtagcggacacttggggcggtgcggagaccgtagaccgtgcggagctggcgggcatgttgtccgaccgtaaacctcggcccgagcggcctggagcgaagtcggacaacatgcccgccagctccgcactcgttaggtgcagtgacttgcgtctgcatctccgagtcgggtgcatgttttgcgcgagtgtggtatcgcacgcttgctgcggtgacagcgagatgagacaagtggtttgcggaaatctgagggtggtcggatttccgcaaactcctcttggggggggttagttttgcggggaggctactacgacgcgggcggcgcggatcacgcggtcaccgatgcggtagccggcttccacgaccgtgtcgacggtctccttctcggcctcggcgtccggcttgtgcaggatcgcctcatgcttggtggggtcgaattcctcgcctttttcgccgaacttctccacgccgaacttctcgaacgccttgtcgatcttcgcggccacggccttgaaggaatcgtccatctcgctgtgttcgcggatgcgatcgatgtcgtcgagcgccggcagcaacgcggtcagcacgtcgatgatgccatgctggcggaaacgctcctgctcgcgctgcgcacgattgcggtagttgacgaactcggcgcgttcacgctgcaacgcttcgagatagtcggcggcttccttcttggccttgcccagcggggtcagcgagtcgtcggcggccgctccgtcatccgcagccgcggcagcggagtcaccggtcttatcggaagggcccgcttcggcggacgccttgtccccagccgggccggcagcgcccttatcagcagacgcatccgcagacttggccgagtccgacgccttgccggcagaaccggcggcagcgccgtcggaagggccggcctgcccggtggcggacaggttgtccgcgtcaggcaggtcgttcaggtaatcgtccttgttgaactcggacatgattacttgttgtccttcttgtcgtcatcgtccacgacctcggcgtccaccacgtcgtcatcgccaccgttggaggcggcacccgacgcaccggcagccgcaccggcagcatcagcagcgcccgcagcaccctgctgcgcgtacagtgcctcgccgatcttctgcgcggaagtcatgagctcgctctgcgcgctcttgatcttctcgatgtcctcgcccttcagggcttccttcagggcgttcaccttgtcggtgacttccttggcgatctcgtcggagatcttatccttgttgtcgttgaccagcttctcggtctggtaggcgaatgcctcggcctggttgcgggtctcggcgtcctccttgcgcttcttgtcctcggcctcgtgggcttcggcctccttgaccatgcggtcgatctcgtccttcggcaggcccgagccaccggtgatggtcatcgactgctccttgccggtgcccttgtccttggcggacacgtgcacgatgccgttggcgtcgatgtcgaaggtgacctcgatctgcgggatgccacgcggagccggcgcgatgccggtcagctcgaaggtgcccagcggcttgttgtcgcgagcgaactcacgctcgccctgatagacctgaatcagcacggacggctggttgtcttccgcggtggagaacacctcggagcgcttggtcggaatggcggtgttgcggtcgatgagcttggtcatgatgccgcccttggtctcgatgccaaggctcagcggggtcacgtcgatcagcaggacgtccttgcggtcgcccttgatgacgccggactgcacagcggcgccgacggccacgacctcatccgggttcacggactggttcgcttccttgccgccggtaagctccttgacgagctccttgacggccggcatacgggtggagccaccgaccagcaccacgtggtcgatgtcgctcacggagatgttggcatcgcgcagcacgttgttgaacggcgtgcggcagcggcccagcaggtcggaggtcatttcctcgaagtgcgcacgggtcagggtctcgtccaggtgcaccggggtgccgtcgggcgtcatggccaggtactgcatgttgatggaggtcgaagtggacgaagacagttccttcttcgcctgctccgcggcttccttcagacgctgcagcgcgatcttgtccttggacaggtcgacgccgtacttgttcttgacctcgccgacgagccagtcgatgaccttctgatcccagtcgtcgccgcccaggtggttgtcgccgttggtggccttcacctgaatggtggagaagccgtcgtcgtccttgccgatctccagcagggacacatcgaaggtgccgccgccgaggtcgaagaccaggatgcgctcgtcttccttgcccttctcaagaccgtaggccagcgcggccgcggtcggctcgttgatgatgcgcaggacgttcaggcctgcgatcttgccggcgtccttggtggcctgacgctgggcgtcgttgaagtatgccgggcaggtgatgacggcatcggtgacgggctcgccgaggtacgcctcggcgtccctcttcagcttcatcaggatctgcgcggagatctcctgaggcgtccacttcttgccgtcgatctcgacggtccagtcggtgcccatgtgacgcttcacggagctgatggtgcgatcgacgttggtcacggcctgacgcttggcgacctcgccgaccaggatctcgccggacttactgaacgccaccacggacggcgtggtgcgcgcgccttcggcgttcacgatgacggtgggctcgccaccttcaagggtcgcgatgcaggaattcgtagtacccagatcaataccaactgcacgtgccataatgtgtgctccttaaatatcttgttcgtttacgtttgcttgctcaagtcttggccccgcggccatcggtgctcgatcgacacccacgggtcttcgcctcaaggttgccctcgttttgccttccaaaacttgagcctacaccactcaactttcgagcaccagcttttattcccacttcttcacaaaaacttgagtcgatatcactcaagtccgctctcaaaactcgcagatacaccgatttcttagcgaaaaagccgccgtatctgcgagttctgagagcacccaaatgcaaagagccggccgcaaccatcacaggttgcggccggctggcgtatcagtcgccctaggcgacgtcacgaatcgcggcgagcgtcagcttagcggcgacccgccttgacggagcgcacgaccatcgcgccggcgcccagagcgagcaccatcagcgccaggccgagcacggtcgcgccggtcttgcccagaggagcggtcggctccttgacggtgccctgagcgacagtgccgctgccgttgccgccgttcggcgtcttgtcggcggagcctgaggcggacgggaagctcacggaggcggacttgccggactggcggccgttcaccgtcagcgtgtaggacgcgccctcggccggagtgaagtcggcgaacgagatcgaggtggtggccgcggtggcgacgcgcacgccggagagcggggtggacgtgttggactcggcgacgaccttcttggaggcgttgtcgaccagctggtacgacagcaccgcgtcaccgttgaagccggtgacggccgcgctgtacttgccgtccttgtccttgttcacggtgaccttgccgccgttggacaggttgttctgcgacgtggtgtcggtcgccaggccaagggcgccggcgatcgtgtagaagttatcggtctggtcggtcaggccatccacgcgggacgcaccgggacccgatgcggcgatgcgcagctgggtgccggtgtggctcatgttgccctgggccttgctggaatcggccgcgccttcggtgtcttggccgtcggagtacaggttcttctcggaggtgccgtaggagatggtggtcttggagccgtcggcgttcttcagcacggtgctcagcgcgtagtacggctgggattcgacgatctgcgaggtgtgggcgtggtcggcggtcacgatgatgagggtgtcgctcaggtcgaccttcttgagggcggcggagatggccttgtcaaggtcgtcggtctcgccgatctggccgcaggcgttggcgttgtggtcctgcttgtcgatggaagcgccttcgacctgcaggaagaagcccttctcggacttcgggttggcctgcagcaggtcgagcgccttgccggtgaagtcggcgagggacgcgccctgattgccgagccacttggcgttggtggtgcacacggtcgggttctcgtccttggcggcgtcctgcttggtggccacagacgggttgaactgggtcggcaggttgccgtcgccgagcagggcgagcaccggctggccatccttgtaggtcaggttcttgaagccgtcgacgtcaccgctcttgacggtctggaaaccgcggtcagcggcctgctgccacagggtgttgccgttctcgtcgagctggttgaagtacttggcgccgccgccgatggtcacgtcggcgcgcgtgtcgagcagctgctcggagatggagccgatgccaccgttggccttgagctggtcggcgaggcacctgccgatgccggcgagctcggcgtctttgatatcgaccttgccgtcgccgttcttgtcggtgccgtcccacttgccctgcgggccgtagcaggcgcgctcggaggagtgggattcctggaccgccggagtggcatcctggatctcggaggtggtcacgttgccggtggcgaggccgttggccttggcgagctcaatgaggttgagctgcgggttgcccttgacgtccacggacacggcgttgttgtaggtcttggtgccggtcgcccagccggagccggaggcggaggagtcggtgaccggggtgatcacgccggcggtcttggaaccggtgagctggcccttggaatccttggccatcagcgaatcgttggagctgccgcccagcgagaacgtggtatactggccgacgccgctttcggcggccttgccggtcgaggtctggagtgcgcccggctggccgatcttgtcgaggccctggaacgtgccgttgacgccgtgcaggtagttgcgtgcgacggtgatctcggaatctcccatgccgtcgccgatgaacaggatgacgttcttcgccttcgcgttgccgatcgtggcgatgcgctgggcgccgccgtgcaccgacagggcgtccacgcccttgccgttcagatcgtaggtgccgctcgcggcgaacgccggagcggtcagcgcgcccagggccgcagctgaggtcaacgccgcgacggcgcctttgagcattttgttgatgttcatggatctcttcttccaatcacgaagccgggcatgccccggcggtcaatcaccggcgccgtcgggcacagcaagcctctctcggcagcgccggaaggcctcgcggccctcaccgagcaaactatgtcggccattcaaccgtcacgcgacgagtatccgaacgtaacgtgaacttccgcggtcattttccgtaaccgagagaacggttttcattttcaaagagccttacacacacccctttctctttgagaacgtttgcagtataatgaaacgaatatgatgtcggcagtcacggcacgatggggaattcaacacacagcaaaggagttgtctacatggataaagcaggaatacgcgaagtggcaaaagcggcaggggtctccatatccaccgtatcccgcgcattcgcccaccccgaagtcgtgtcggagaagacacggcacaaggtgctgcaggccgcggaccagctcgacttcaacatctcccgctcggccgcggccctgaaatccgggcagacgttccgcgtggcgctgctcatgaacgaggagatcaccagctggttcaacacccagatcttcgccggcatcaactcgatcatgcacgacgccggctatgacatctccgtcttccagcacatcgacaccgccgacatgcgccgcaagttcttcaccgacctgccagtgcgacgcaacgtcgacgcggtgttcgtggcgtccttcgccatcgacgagaaagaggtcgaacagctcaagcgcatccgcgtgccgatcatcggcatcaacacgccgtccatcgacggattcgacgcctccatcagtatcgacgacgaaaacggcatgtacacggccacccagcatctgctcaacctcggccacaagcacatcgtgtacgcctgctcggcggcgtccgagtccatggactcctcgatcgacgcccgcggccgcggattcatccgcgcctgcgaaaacgtcgagaagaggcgcgaactcaactggcaggtggtcaccgtgccgcgcggacgcgcgttcgccgattcggcgctgtcggcgctgctcgcgctggacgagttccccgacgccatctgctgccagatagacatgatggcgattccgctgatgctcaagctcgaacgctacggacaccgcacgccacgcgactactcgatcatcggcttcgacgacagcccctatgccgacaccgtcaacctcaccaccatgaaacaggacccgttcaagatgggacgttcggccgcccagaaggcaatcaagctcatcaacggagaggaacccgagaagccgcatgaaatcgtgcagccgaccctgatgctgcgcgagtcagacgccctgtacacggactgaacccgtttcagaccgccagggcgcagaccaccagcgcgatcagaagtccgaatatgggattcatcacgctccaatcccaccatcggccggtcacgatcttgtcatacggggcctctgcgaccaccgccgcgaccaacagccgcaacccgtaccgccacacgtcaccggtgtgccgccagttcttgcccgcatcgttgtacttgtgacgccagtttgccgttgatgacggtgaggccttcggctccggcggcgtatgagccgtcgggtgtgttcgaggagctcagagtgatgttgccttcggcgtcgacgccggcggagggtttcttaccgacgtacatggacgtcagcagttccagcgctcgatgacacggtcccccttgtatacggacagaatcgaataatgagcggtatccagacgcagcagacgcgcgaaatgcgggtcgacccccagccaacgtgccgtaaggatgcgcagcacatgcgcgtgcgcgacgaacagcacggaatggccgctctccatcagcggcaccgcctgatcgatggcctgctgcacacggtcatagacgtcgctcagcgactcgcccggcccgttatgcacgggaacctgctcgccgtccggcagcgtctccgtccagtcgccttccattgtggggctcagcgcatcgggaccatcattccatagctcccaagagccgccgtgcaattgcgcgatggtctgacgggtacggccctccgcccggccgtaatcccattccgcgagcgccggcagcgtacgcggagcgaacccggcgaggcttgccgtctgctgggccctcttcagcgggctggcgtacacgcagttctcgccgaatccctgcggaaacgccgtctgaatccgggtgccggcatcgcgggcctgtcgctcgccttcggcggtaagaggaatatcggtgcgcccggtatgctgcccggactcactccacacagtctgcccgtgtcggagcagaaccagtcgccctgccgtagccgcgttgccacctgtcgtttgagtcatatgcagtactgtactcaacctgcagcatattcgcatgccgaggcctatatgcgatgcgtctccacctcgcaaaataatggtgacatgacagaatttcaggatggaccgggcaacgacggatcggggctcgacggttcaagcaccgatcggatcatcgaaggcttcgcccgaatcaacgagaaagtggatgccatgcgtaatcagcgtctgaacgaccccgactccctcggcgataaggccgtcaaattcgcgctgccgtccatcgcgggattcgtggccggcaagctgttcactctggtgtggaacaagttcgtcgcccgcaagcgtccatccgatggcacgggcgagctgggggacggagtcgtggaccagcaggagagcctgttcatgagcatcctgttcgccgcattgtccgccgccgtgggagccgcggtctcgcaactctccgatcgcggctccaaagccctcgtcgctcgccgtcaccgtcgccaatccgactgataatcgcttggcgtcgtccagcgcattgtcgccgtgcatcttctatgcgcatcagcccgttttgcgtctttaagtgcgcgccgaaacgacaagtgcgcgaacataggaacgcaaatgaccctgtttgcgtacctaagtgcgcacggtcgtcgtttcggcgcgcacttaaagacgttttggggcgccagcattaccgacgtgttccccgtcagcgcaaatgggtggctcttggggcgtctctttgcgacaatgacagcatggttaccaacagcactatcgagacgctgctcaatcgcaggtccatccgcaaattcgttgccgagcccttcgacgatgataccgtcgccacgctggagaccgtggcccagcacgccgcttccagccagtatctgaacgactggtcggctgtccgtgtcaaggatccggcgcttaagaagcgcatgtccgagatcggcaggcagccgtatatcgccgaagcaccgctgctgtatgtgttcgtcgcggacgagcaccgcaatgcgattatcgccgagtcgaagggcgtgtccacggattcggacacctacggtctcgccggtagctaccggttctctcaggcccagaacgatgcggttctggctttgcatgcgatggagaccgccgcctattcgctcggcctgggatgcgtcatcctcggttccctgctcaatgatgttcccggtctgatcgaagcgctgcacctgccccagtacacgtatcctgtgctgggattggcgatcggcaagcccgatcaggctcccgcgctcaagcctcgcatgcctcgcgagctgcagttcttcgatgacgtgtatccgtcggatgctgacgccactgaatccatcaaggagcgtatcggcgcctttgacgtttcagtgcatgagtactacgatctgcgcaacaccgatcgtcccgttgacgcattcagcgatcagatcgcctcgattgcagcccagcgcatggacgccgcgcatcaggtgataccgaacgccacatcgcagggattccgtctcgaccggtaaatgacccccaaacgataatgggcggtggtcggaacccgatatcaggttccggccaccgcccattgtgttatctgactcgtgttgttcggccctcgcggattcgcctattcagcgaatgacgggagaagagcatcaacgccaccgcggcttgtagcccttcttgcggctgtgcggttttatctgctggttcagggggacatacgtgtgctcatgagcgggatcacgatgcgtcagatgccaggtgccgcagtattcgcaccgatacacccacagctccgctccgcgttcgataaggctctggtcggcggcgtgctgcgcctgggccttgtcatggtacatgatcttgttcgaggtggaacagcgtttcggagtgaagtaatgcatagcaacaccacagtctaggacaggagttcttctgttgcaacggctgttggttgttgtgtttgggtatgggtgggcccccgggggttgttggcctcgtccgggggtccttgtcgtgtggtgcggcggcgtgctactctcccacaccctgtcgggtgcagtaccatcgccgtgccaggccttagcttccgggttcggaatgggaccgggcgtctctcctgggccatggccgccgcaaatcttgggttatcggccgggaaacggggtttcccgccggcgtgtggcggttcggggaccggacaatggacgcggtgcgtgttgctgttgactgatcgtgcgcgtgtgaggaccgtgctccctgtgcgccttcgcggggccctgccgggtcctgcgccacacgcctcccgggcgtgtggatgtgggttgcctctcgaccattagtaccggtcggctccacccctcgcggggcttccacgtccggcctatcgaccacgtgttctgcatggggtcttcagcggctcggggccgcatggaatccttatcttggagaaggcttcccgcttagatgctttcagcggttatcccttccgaacgtagccaaccggccgcgccactggcgtgacgaccggcataccagaggttcgtccacccaggtcctctcgtactatgggcaggcctcctcaagattccaacgagcgcagaggatagagaccaaactgtctcacgacgttctgaacccagctcgcgtgccgctttgatcggcgaacagccgaacccttgggacctgctccagccccaggatgcgacgagccgacatcgaggtgccaaaccatcccgtcgatatggactcttgggaatgatcagcctgttatccccggggtaccttttatccgttgagcgatgccgcgcccgtgcgccggcaccggatcactatctccgactttcgtccctgctcgatccgtcgatctcgcagtcaagcccgcttgtgcgattacactcgacacccgattgccaaccgggccgagcggacctttgagcgcctccgttactctttgggaggcaaccgccccagttgaactacccgccaggcactgtccctgaacaggatgactgttcgaggttagacatcaaacgagaacagagcggtatttcaccttgcggctccgcggatgctggcgcacccgcctcgaagcctcccgcctatgctacacaatccgcgcctaatgccaataccaaggtatagtaaaggtcccggggtcttttcgtccttctgcgcttaacgagcatctttactcgtactgcaatttcgccgagctcctggtcgagacagtggggaagtcgttacgccattcgtgcaggtcggaacttacccgacaaggaatttcgctaccttaggatggttatagttaccaccgccgtttaccggggcttgaattcaccgcttcgcagaaagctgacggatcctcttaaccttccggcaccgggcaggcgtcagagcgtatacagcggcttgcgccttcgcacgctcctgtgtttttggtaaacagtcgctaccccctggcctgtgccaccccccgccgctcatcaccgcagggggtctcccttatgccgaaggcacgggagcaatttgccgagttccttgaccaggattcgctcgatcgctttggtattctctacctgaccaccagtgtcggtttggggtacgggcggcaacgcgcctgacgccgaagcttttctcggcaccacggatcaccggattcgggccgtaaggcccccatcatcacgcctcgccccgacgccccgcggatttgcctgcgggacgggctcgaacgcttgaccacggaaaaccacctccgcggccggctgccctgatgcgtcactcctgcgctgacctactacgaggggggatcccaacgcgcccgcgccgcgaccccccgaaaggggagacggcacggacccggaggttagcgccccaggcctcggttgtttcggttcgctgccggtacgggaatatcagcccgttcatccattcgactacgcctgtcggcctcgccttaggacccgactcacccggggacgacgaacgtggccccggaacccttggtcatccagcgggcgggattcgcacccgcctctcgctactcatgtctgcattctcactccccaacggtccacggcaggcttgcgccgccgcttcgccccgatggggacgctctcctacccagcatccaaacggacgctgccgcgtcttcggtggcgtgcttgagccccgctacattgtcggcgcggaaccactagaccagtgagctgttacgcactctttcaagggtggctgcttctgagccaacctcctggctgtctatgcgactccacatcctttcccacttagcacgcgcttggggaccttagacgacgatctgggctgtctccctttcgacgacggagcttatcccccgccgactcactgccgggatacgcgtcacgggtattcggagtttggctgctgtcggtacccgatacgggccctcaagcatccagtagctctaccccccggacgtaatccccgacgctgcacctaaatgcatttcggagagaaccagctatcacggaatttgattggcctttcacccctaaccccaagtcatccccccggttttcaacccaggtgggttcggtcctccacgcggtcttacccgcgcttcaacctgctcagggctagatcatcccgcttcgggtccaggacacgcgactcaaacgccttttgagactcgccttcgctacgcgtaccccacacgggttacgctcgccacgtgccactgactcgcagactcatttttcgataggcacgccgtcaccccgaaaggctccgacggtttgtaagcgcacggtttcagagactgtttcactcccctcccggggtgcttttcacctttccctcacggtactagttcgctatcggtcagacaggtatatctaggcttaccccacggtcggggcggattcacacgggattccacgagtcccgcgctacttgggaaacacgatccggagacgacgcgcgttcggctacggggccatcaccctctgcggcccggcattcaatccggttcgcctcacacgccgttttatcactccggccgggcccgccaggacccggacacacgctccctcaacaccacgcgcgcaacggctggcgcctgtcacacgcgcgcggtttggcctgatccgctttcgctcgccactactcacggaacatcctttcctgcaggtactgagatgtttcacttccctgcgtaccccccgcgcgaacgcggtgccggcccatgacggccggcgggttcccccattcggaaatcctcggatcaaagccctgctggcggctccccgaggcatatcgcagcctcaaacgtccttcatcggtactgtctgccaaggcatccaccatacgcccttgcaagcaacccgcacgacccatccgggaacggcgggaaaccgcaagcccacggcaaaaactccgctggcaacacaaatcatcacacaaatgatcacacacaaaacgatcaaacaccagactccgaagagtccggcgaaatcaacagcagaagacacccccaaaagggcgtcccctgctcgcgtccactatccagttctcaaaccaccacgcacccgcacgcgagcccacccaccccaccaggggacgggcgaccggcacggggcacggaacaccagccacgccaaacggcgcggggtggcggtccgggaacccaaaagcatgcccgcaccactcctggacgcaccgcacgaccggcacgcccgaaggccgactccactcttccacaccagcaacccccgcgcacccggcacatccggggcaagggggcacacaccggccaccagacagtggcctgaaatctccgtagaaaggaggtgatccagccgcaccttccggtacggctaccttgttacgacttagtcccaatcacgagcctcaccttagacggctccatcccacaaggggttaggccaccggcttcgggtgctgcccactttcatgacttgacgggcggtgtgtacaaggcccgggaacgcattcaccgcggcgttgctgatccgcgattactagcgactccgccttcacggagccgggttgcaggctccgatccgaactgagaccggttttcagggatccgctccatgtcgccatgtcgcatcccgctgtaccggccattgtagcatgcgtgaagccctggacgtaaggggcatgatgatctgacgtcatccccaccttcctccgagttaaccccggcggtcccccgtgagttcccaccataacgtgctggcaacacggggcgagggttgcgctcgttgcgggacttaacccaacatctcacgacacgagctgacgacgaccatgcaccacctgtgaacccgccccgaagggaaacgccatctctggcgtcgtcgggaacatgtcaagcccaggtaaggttcttcgcgttgcatcgaattaatccgcatgctccgccgcttgtgcgggcccccgtcaatttctttgagttttagccttgcggccgtactccccaggcgggacgcttaacgcgttagctccgacacggaacacgtggaacgtgccccacatccagcgtccaccgtttacggcgtggactaccagggtatctaatcctgttcgctccccacgctttcgctcctcagcgtcagtgacggcccagagacctgccttcgccatcggtgttcttcccgatatctacacattccaccgttacaccgggaattccagtctcccctaccgcactccagcccgcccgtacccggcgcagatccaccgttaagcgatggactttcacaccggacgcgacgagccgcctacgagccctttacgcccaataaatccggataacgcttgcgccctacgtattaccgcggctgctggcacgtagttagccggcgcttattcgaaaggtacactcacccgaaggcttgctcccaaacaaaagaggtttacaacccgaaggcctccatccctcacgcggcgtcgctgcatcaggcttgcgcccattgtgcaatattccccactgctgcctcccgtaggagtctgggccgtatctcagtcccaatgtggccggtcgccctctcaggccggctacccgtcgaagccttggtgagccgttacctcaccaacaagctgataggacgcgaccccatcccacgccgatagaatctttcccacaatcacatgcgatcatgtggaacatccggcattaccacccgtttccaggagctattccggagcatggggcaggtcggtcacgcattactcacccgttcgccactctcaccaccaagcaagcttgatggatcccgttcgacttgcatgtgttaagcacgccgccagcgttcatcctgagccagaatcgaaccctccacaaaaaaaaattgcaaaaggaaccattgaatgaccccaaaaattgacgcgacttcttaataaggaaaagaagtccgcacgaaaaaccccggcccccatcaagcgccctcgcgcacccacgggcaaacacccgcaggcgggaaccggactggcataaaatcaaccaaaaaagtagtacaaacacactcttgagttctcaaaccaccaccactcggccagctcagcaaccccagtgaagaagttcatcgctaaccggcagcgagtagataacttacacgagttggccgaccaacgcaaatcgacatgccccaagacacccaaaaccgttgaaacaacaacattccatcggcgtgtcgaaaatggccttcaaacacaccctatgaccagaatacccctcctggcagggcggaaaaaactcatatttcattgttctcgggcgtgtcgcaaactattcagaccatgttcaccgaggtccggcagcgattcacggcacctatcgaagccatccacgacaaatcggaagacgtaacgccttcccggcgaccgcaggataccgggaagggcatgcggcggctcaccagttcgacacgatgatgcgataccgtcgagataacgacatgacgcggcaccgcgccgcgacgacactatgtgcaatggcactgaggttgcaatgacaccgggaggataaaatgcagcacattccgtgggacggcgacatggcggaatttcccgaaccgctgcgcaggtatctacgccctgggcatgtattcgacagcagctcgtccgccgaagcaaccgtatattattccgacatcggccagggatgctatatcaagaaggcccgtcacggcgcactgcggaacgaggcggcaatgacacggtattttcatgacaaaggactgtccgccgcggtgctgcattatggtcaggaccatgacggcaatgactggttggcgacggcatgtctgccaggtgacgactgcaccgcgtctctttacgtgagggagcccgaacgtttggccgccgtcctgggacgacggctgcgtatgctgcatgagcaagatccaaccggatgccctgtgtcgaaccgtacgaaagactatctggcggcagtagagcggaatcatgcgcagggatgtgcggaccgttccttcttcacgcgggtctacgggaacgccgacaccgaatcgatatatcgcctggtgcggcagcatggcgacgaattgcgtcacgatacgttgctgcatggtgattattgcctgccgaatgtcatacttgacgattggcggttcagcggtttcgttgatttggattgcgccggagtcggcgacagacatgtggatgtgtactgggctttgtggacgctatggttcaatttgcataccgatgcatacggcgaccgccttctggatgcctacggacgtgatctcatcgacatggagacactgcggctggtcgccgcctgtgaggtattcggataatccgttccgtgcatgagagcatccgatccggtcgcgcctggatacaggcgacagcgattggacgacgatacgcgcagtgacgatacgcacagtgaaatacatggacgatgatgcataatgccgataacggacattatgttctctttggcttatgcgttgcagccattacattgagtacagtacgactccatcggcttccgtcctcgctgacggtagcccctgtgaagcggatgaggtgcgttgacctcgtgcctgttggttgttgtgtttgggtatgggtgggcccccgggggttgttggcctcgtccgggggtccttgtcgtgtggtgcggcggcgtgctactctcccacaccctgtcgggtgcagtaccatcgccgtgccaggccttagcttccgggttcggaatgggaccgggcgtctctcctgggccatggccgccgcaaatcttgggttatcggccgggaaacggggtttcccgccggcgtgtggcggttcggggaccggacaatggacgcggtgcgtgttgctgttgactgatcgtgcgcgtgtgaggaccgtgctccctgtgcgccttcgcggggccctgccgggtcctgcgccacacgcctcccgggcgtgtggatgtgggttgcctctcgaccattagtaccggtcggctccacccctcgcggggcttccacgtccggcctatcgaccacgtgttctgcatggggtcttcagcggctcggggccgcatggaatccttatcttggagaaggcttcccgcttagatgctttcagcggttatcccttccgaacgtagccaaccggccgcgccactggcgtgacgaccggcataccagaggttcgtccacccaggtcctctcgtactatgggcaggcctcctcaagattccaacgagcgcagaggatagagaccaaactgtctcacgacgttctgaacccagctcgcgtgccgctttgatcggcgaacagccgaacccttgggacctgctccagccccaggatgcgacgagccgacatcgaggtgccaaaccatcccgtcgatatggactcttgggaatgatcagcctgttatccccggggtaccttttatccgttgagcgatgccgcgcccgtgcgccggcaccggatcactatctccgactttcgtccctgctcgatccgtcgatctcgcagtcaagcccgcttgtgcgattacactcgacacccgattgccaaccgggccgagcggacctttgagcgcctccgttactctttgggaggcaaccgccccagttgaactacccgccaggcactgtccctgaacaggatgactgttcgaggttagacatcaaacgagaacagagcggtatttcaccttgcggctccgcggatgctggcgcacccgcctcgaagcctcccgcctatgctacacaatccgcgcctaatgccaataccaaggtatagtaaaggtcccggggtcttttcgtccttctgcgcttaacgagcatctttactcgtactgcaatttcgccgagctcctggtcgagacagtggggaagtcgttacgccattcgtgcaggtcggaacttacccgacaaggaatttcgctaccttaggatggttatagttaccaccgccgtttaccggggcttgaattcaccgcttcgcagaaagctgacggatcctcttaaccttccggcaccgggcaggcgtcagagcgtatacagcggcttgcgccttcgcacgctcctgtgtttttggtaaacagtcgctaccccctggcctgtgccaccccccgccgctcatcaccgcagggggtctcccttatgccgaaggcacgggagcaatttgccgagttccttgaccaggattcgctcgatcgctttggtattctctacctgaccaccagtgtcggtttggggtacgggcggcaacgcgcctgacgccgaagcttttctcggcaccacggatcaccggattcgggccgtaaggcccccatcatcacgcctcgccccgacgccccgcggatttgcctgcgggacgggctcgaacgcttgaccacggaaaaccacctccgcggccggctgccctgatgcgtcactcctgcgctgacctactacgaggggggatcccaacgcgcccgcgccgcgaccccccgaaaggggagacggcacggacccggaggttagcgccccaggcctcggttgtttcggttcgctgccggtacgggaatatcagcccgttcatccattcgactacgcctgtcggcctcgccttaggacccgactcacccggggacgacgaacgtggccccggaacccttggtcatccagcgggcgggattcgcacccgcctctcgctactcatgtctgcattctcactccccaacggtccacggcaggcttgcgccgccgcttcgccccgatggggacgctctcctacccagcatccaaacggacgctgccgcgtcttcggtggcgtgcttgagccccgctacattgtcggcgcggaaccactagaccagtgagctgttacgcactctttcaagggtggctgcttctgagccaacctcctggctgtctatgcgactccacatcctttcccacttagcacgcgcttggggaccttagacgacgatctgggctgtctccctttcgacgacggagcttatcccccgccgactcactgccgggatacgcgtcacgggtattcggagtttggctgctgtcggtacccgatacgggccctcaagcatccagtagctctaccccccggacgtaatccccgacgctgcacctaaatgcatttcggagagaaccagctatcacggaatttgattggcctttcacccctaaccccaagtcatccccccggttttcaacccaggtgggttcggtcctccacgcggtcttacccgcgcttcaacctgctcagggctagatcatcccgcttcgggtccaggacacgcgactcaaacgccttttgagactcgccttcgctacgcgtaccccacacgggttacgctcgccacgtgccactgactcgcagactcatttttcgataggcacgccgtcaccccgaaaggctccgacggtttgtaagcgcacggtttcagagactgtttcactcccctcccggggtgcttttcacctttccctcacggtactagttcgctatcggtcagacaggtatatctaggcttaccccacggtcggggcggattcacacgggattccacgagtcccgcgctacttgggaaacacgatccggagacgacgcgcgttcggctacggggccatcaccctctgcggcccggcattcaatccggttcgcctcacacgccgttttatcactccggccgggcccgccaggacccggacacacgctccctcaacaccacgcgcgcaacggctggcgcctgtcacacgcgcgcggtttggcctgatccgctttcgctcgccactactcacggaacatcctttcctgcaggtactgagatgtttcacttccctgcgtaccccccgcgcgaacgcggtgccggcccatgacggccggcgggttcccccattcggaaatcctcggatcaaagccctgctggcggctccccgaggcatatcgcagcctcaaacgtccttcatcggtactgtctgccaaggcatccaccatacgcccttgcaagcaacccgcacgacccatccgggaacggcgggaaaccgcaagcccacggcaaaaactccgctggcaacacaaatcatcacacaaatgatcacacacaaaacgatcaaacaccagactccgaagagtccggcgaaatcaacagcagaagacacccccaaaagggcgtcccctgctcgcgtccactatccagttctcaaaccaccacgcacccgcacgcgagcccacccaccccaccaggggacgggcgaccggcacggggcacggaacaccagccacgccaaacggcgcggggtggcggtccgggaacccaaaagcatgcccgcaccactcctggacgcaccgcacgaccggcacgcccgaaggccgactccactcttccacaccagcaacccccgcgcacccggcacatccggggcaagggggcacacaccggccaccagacagtggcctgaaatctccgtagaaaggaggtgatccagccgcaccttccggtacggctaccttgttacgacttagtcccaatcacgagcctcaccttagacggctccatcccacaaggggttaggccaccggcttcgggtgctgcccactttcatgacttgacgggcggtgtgtacaaggcccgggaacgcattcaccgcggcgttgctgatccgcgattactagcgactccgccttcacggagccgggttgcaggctccgatccgaactgagaccggttttcagggatccgctccatgtcgccatgtcgcatcccgctgtaccggccattgtagcatgcgtgaagccctggacgtaaggggcatgatgatctgacgtcatccccaccttcctccgagttaaccccggcggtcccccgtgagttcccaccataacgtgctggcaacacggggcgagggttgcgctcgttgcgggacttaacccaacatctcacgacacgagctgacgacgaccatgcaccacctgtgaacccgccccgaagggaaacgccatctctggcgtcgtcgggaacatgtcaagcccaggtaaggttcttcgcgttgcatcgaattaatccgcatgctccgccgcttgtgcgggcccccgtcaatttctttgagttttagccttgcggccgtactccccaggcgggacgcttaacgcgttagctccgacacggaacacgtggaacgtgccccacatccagcgtccaccgtttacggcgtggactaccagggtatctaatcctgttcgctccccacgctttcgctcctcagcgtcagtgacggcccagagacctgccttcgccatcggtgttcttcccgatatctacacattccaccgttacaccgggaattccagtctcccctaccgcactccagcccgcccgtacccggcgcagatccaccgttaagcgatggactttcacaccggacgcgacgagccgcctacgagccctttacgcccaataaatccggataacgcttgcgccctacgtattaccgcggctgctggcacgtagttagccggcgcttattcgaaaggtacactcacccgaaggcttgctcccaaacaaaagaggtttacaacccgaaggcctccatccctcacgcggcgtcgctgcatcaggcttgcgcccattgtgcaatattccccactgctgcctcccgtaggagtctgggccgtatctcagtcccaatgtggccggtcgccctctcaggccggctacccgtcgaagccttggtgagccgttacctcaccaacaagctgataggacgcgaccccatcccacgccgatagaatctttcccacaatcacatgcgatcatgtggaacatccggcattaccacccgtttccaggagctattccggagcatggggcaggtcggtcacgcattactcacccgttcgccactctcaccaccaagcaagcttgatggatcccgttcgacttgcatgtgttaagcacgccgccagcgttcatcctgagccagaatcgaaccctccacaaaaaaaaattgcaaaaggaaccattgaatgaccccaaaaattgacgcgacttcttaataaggaaaagaagtccgcacgaaaaaccccggcccccatcaagcgccctcgcgcacccacgggcaaacacccgcaggcgggaaccggactggcataaaatcaaccaaaaaagtagtacaaacacactcttgagttctcaaaccaccaccactcggccagctcagcaaccccagtgaagaagttcatcgctaaccggcagcgagtagataacttacacgagttggccgaccaacgcaaatcgacatgccccaagacacccaaaaccgttgaaacaacaacattccatcggcgtgtcgaaaatcgtcaaaatacgccttcaataccaacttcagaccgtctttcgtttccaaatcgttaggaaaacggtccttgtacggcgtgttgtgcaatgttccccacacagacggcggccattcacccaccgttcaacgccggaaggcagacacattcctgtggtaagcctgtaatcatgaaacacatcgcagtattgacgggcgccggcatctccacgtcggcgggcatccccgacttccgcggcccggacggcgtctggaccaaacaccccgagcagatgagcgtctatgacatcgacgccttcctgtccgctaaggagaagcgcgaatactcctggcgctggcagaaggaatcaccggtatggaacgcgcagcccggagccgcgcacaaagcactggtcaaactggagaaagccggcatgctcacgctgctcgccacgcagaacttcgacgcactgcacgagaaggcgggcaacagcccggacgtcatcgtcaacctgcacggcaccatcggcacctcacactgtatgaaatgccacgcgaaatacgacaccgccgacatcatggcccgcctggacgaagagcccgacccgcattgccaccgcacgcttccctatagtggcggtatgccctgcaacggcctgatcaaaaccgatgtcgtctatttcggagaggccctgccggacggcgcaatggagaaatcctataagctggcctcgcgcgcggacgagctgtgggtcatcggctcgacgctggaagtatatccggcggcgagcatcgtgcccgtggccgcacaggcgggagtgccgatcaccatcatgaacatggggcgcacgcaatgcgaccgtctcgcgtcgcgtctgattcgcgacgacatcgcagttgcgctgccgaagctggtggacgagaccatctctgcggcacagtaacggcgcagtagcggcacggctatgcaacggccagccatgacggccggcttatacgcagcgggggtgcccggacgagatggtccgggcacccccgcatgtcatcggcgtcaaagccgcaccgcttcatttcgcatctgcgaaagccggcggaaacccacggcgtcagtaaatgcgcttgggctggaagcctgcctccttcagcgccatgagaatatggtcgatgtgatccggaccattggtctcgacggtcacaccgagtgaaaccgcattcgtatagtggccggacgccttgaactggtcgtgatccagagcgataacgttcgcacgttcacgagcaagcagctgtgccaccttgaccagctgtccaggggtgtcaggcagctccacctcgaagttcatgatgcggccgcgggcgatcatacccttctgaatcaccgcacccatcgtcaccgtatcgatgttgccgcccgacatgatcggcacgaccacgtgcgggccggtcgcggaggcgaacttgcgcgaacgcaggttcaggtgttccaaagccgccagagataccgcgcccgcagcctcgatgaccagcttgtgcttctccagcatcagcaggatcatctcgttgatatcgcgttcggtgacggtgaccagatcgtccatgaactcgttgagcagggcgaacggcaggtcgccggggtgcttgaccgcaacgccctcggcggacgtgacgacctgatcggcctcggtcacccgtccggcggcgaacgagttcttccatgccgggctgccttcggggatcgcaccaatcacgcgaacctcgggcttgaacgtcttgatggcgagcgccacgccggcgcccaggccaccgccgcccaacggcaccaccacgtcggtgacgttcggcacatcctccagaatctccaggccaatggtgccctgaccgcagatgacctcgtaatcgtcaaagggcggcacatagatcatgccttgcgtggaggccagttcggcggcatgggcggccgcctcgtcgaacacgtcgccgtacagcaccacatcggcgccgtacgccttggtggcgtccactttcagcgggggcgtaatctgcggcatgcagatcgtcgccttggcatgacgctcgcgcgccgcatacgcgacgccctgcgcatggttgccggcggacgcggtgacgatgccgcgggcgatctgctcctcggaaagcgacgcgatcttgttgtacgcgccacgaatcttgaacgaaccggtcacctgcaggttctccggcttgagcagaatctcatgcccggtcagctcagacagtgtgcgagagggaatgatctcagtgtgacgcgcggtgcctttcaaacgcttggcggcgagcttcagctcggccgcgtggtcacgctgcaatgccttaaggacgtctttctgttccatactgcgtattgtatgcgtcgccctgccgaacggacgcggccgtctcacctgcgattgccgcagtcgcggcgacccgtcggaggactggccggaaaacagttgcacgtattcataagtcggcttcgttgcgaggctcccttcgtcgccgagcgtctgatgtatgacggtctcgatggtaggcgaaacgtaatttattgccacggtatcgcgtgtttcttgcgcaaggaaagaaataacccgcataccggtcctgcaattatcgtcgtgaggcaaagaagccggtgagcagacgggcgcaggccgcttcgcgaacgccgccgacgacctgcggcacatgcccgacatgcggatcgcggggaatgtcccaaatcgaaccgcacgcccccagcttcgcgtcccaggccccgaagacgatgcgtccgatgtgagtctggatgcacgccccggcgcacatcgggcatggctctaatgtcaccaccagcgtgcagtcggccagattccagtcgccgcgggcctgcgcggcctcacgcatcgcctcgatctcggcatgcgccaacggatcgtgccccgcctcgcgacggttgcgcccccggccgatcaccgtgcctcgctcgtcgagcaccacggcaccgaccggcacgtcaccctgcttcccggcgcgctctcccagcgcaatcgcctcgcacatcgcctcgtcaagttcgcccatgcgcccagtttatcgaaatcgcgctctcaaaacttgcagatacaaaatcagaaccgccattttccaatacatcgacttttgtatctgcgagttttgagagcgcgattcatgaacaaccaccaatcaggcaccatgccgatgccgtatattgaggcttatgggcgaagaagcggcacacgatacgacacgacgtctttccgacgtgattcccggacgattcggcgatccggtctcggtgcagtatgcctggatgtcacccgaaaacgctgaagcgatgccgacacggccgttgttcctcgcgctgcatggatggggatccaatgaacgcgacatcgccggaatcatgcagtacatcgccccctacaacgatgtggtgtcgctgcgagcgcctctggtcctgcacgcgccggaaggcgtatcggccggcgcatacagctggttccatgacgctgtgccttccggagacgacctggatcacgacatcgcggccgccgcacgcgcggtcgaccagtgggtcgacggccacatccccgcgacgcgcgacgtcgtgccgatcgggttttcgcaaggcggggccgtcgcggtccatctgctgcgcatgcacccggaacgctatcgcgccgtcatcaacctgtcgggattcctcgcgcccgcagacgtgcccggcaccgcgccggcggatgaccggctggccgacttcgagataccggtatatttcggatacggcaagaacgatgcggtcattcccaaatacgagctgttcgccgcggccgcgtggctggaagagcacacgtggctgacgacgaaaagctaccgcgggctggaccatgcggtgagcctggacgagttttcggatatccggcaatggcttgtactgcacgacatcgcgtccggcgtgctgtgacccgcgcgaacccatcggccgcaaccaccccgttcagatgctgctgtcggcgtccacactcatgacgaacacgttgcggcgcagggccttcgcctgggcgcgtgtgatgtcgcccgcctcgagcatgtcctggatgatgcccagctcgatgccgtagctttcgcgcttgatctcttccgcctgagcgatcgccttcgcgctgccgcccatgttcggccgtgacttcaacgcgccctcggcccggcgataatcgaggatcagcgccgagcagtgctccgtacggtaggtgccgcgtcccatctcctcatacagccgatccaccacgtgctccatcacgtcgagctgcagcagccgggagtgcgtgaacatctcgtcctcgctgatcagtggcgtggtacgccggatcttgctgctgatgcgccgtccgagattctccgcacggcgttcgaacgcgcgcatgcgaccgcgaatctgagacaccgcatggcccgaagaggagtccgtggacgtgtgccgcaacgtgttcatgatgtcatccatcatgcgttcgcatgcctccacgcgcatgtcctgctccgccgcatcatccagcgggtgcattttcaattcggcgagcagactcttgagatagtccttctcccagtgcagcgcctcgatctgcagccgctccaatccctgggggtcggattccccgacgcgctgcttcaatctcgtgatgcgcttcgtatacgactcgatgaccatgagcaccgcgcggcggttctcatcgtcgactcgccccgtcaactcctcgacggtcttgcgtaggatctctatggtgatctccgtcatttcgggtgccatgcggtcacggttcggagcgagcagaggcagcatgaaattcgccaatagtagcgtgacgacgatgacgccggatgcgatgaaaatcaactcgtcgcgcatggggaacggcacgccccaggtgacggtgaacgggatggtgaacatcagcgacagggtgatcgtgcccttggcgcctccgaaggtcatcaccgcggcgctgcgccaacgggccggcgtcatcttgcgccgtttgccagtgttgacgtcgcgcgccaaacgcagcatcccggccacccacaggaaccgcatcgtcaccacgaccagcgacaccagcagaatcacgatgctcaggcgcacgttgctcacgccgggatcgtcccaactggcgctcatcgccttcggcagctgcatgccgagcaggatgaacacggcaccgttgaggctgaacgacagcacaccccacacgctggacgacacgatgttggtgcgggcgacgttcggcccgatgccggtccggtcgaaccgcacgaacaggccggacgcaaccaccgcgagaatgccggacacgtgcagttcctctgcggtcaggtacagcatgaacggcaggaacagctccatcaatatgcgggtggtggtggtctcccaacccagcgagcgcacggtctcgaacagccagttcgcgagcagggcaatcaccagaccgtatacggcaccgccgatgaacgagagcgcgaactcgccggcagcccggccgatcgcgaactcgccggtgatggcggcggcgatggcgaactggaagccgacgatgccggacgcgtcattgaacaacgactcgcctttgagcacgcccaactggcgcaggctcagcgacgcctccttgcccagcgagctgaccgccaccgcgtcggtcggccccagcgccgcgccaagcgccagcgcggcggcgagcgtcacggacggccagacggcatggacgacgacgccgaccgccaccatggtagcgatggccagtccgattgccaatgacaatgacagtttcagcgatttcagcaattcggatttgtcgatctcgtgcgcttccagatacagcagcggcgcgatgaacagcaccatgaacagttcgggattcagggaggcgttgggaaatcccggcacctgcgtgatgatcgcgcccatcgcgatctgaaccagcggagtcgacaccttggggatgaaccggctgacgaacgacgagaatacgacgacgccgataatgcacagtatcagctgaaagacttccaaggctcgctccggctctccgtcggttgtgtgggattacttcacaatataaaccgactccgcaaccgacacgttaacttcgacgtccggcttaacggctgcgcgcgggcaaaaagaaaccccggcggtgttgcccgccggggagagaaaggagagagaagaagaaaggggttcagttattgagaatcgtgctgccgattcccggtcggcttgtgctgacaattaatagtaaaacacccgtttcttggtgcaatgctgagattgtctgaaagcttcctgtgagttgatgtcgcgggctgaatcccatcacatggtaatggctgtagactgtagtgtggcgccgtgcgccatacacgtgagcgcgaaaaggagaatcctcatgctgctgtccgaccgcgacattctcgccgcccagaaggacggtcatatttctcttgacccatggactccggaaatggtgcagcccgcgtcgattgacgtgcgcctcgaccgtttcttccgcctgttcaacaatcatgcctacacatacgtggatccggccgagaaccagggggcgctgaccgagcagttcgacgtcgctccggacgagccgtggatcctgcatccgggcgagttcgcgctcggctcgacgtgggagtacgtcaagctcgacgcgacggtggcggcacgcttggaaggcaaaagctcgctgggccgtctgggcatcctcacacattcgacggccggcttcatcgaccccggtttcgaggggcatatcacgctggagttgagcaacgtgtcgacgcttccggtcaagctctggcccggcatgaagatcgggcagatgtgcttcttccagctcagctctccggccgagcacccttacggctccaagggcaccggctcccattatcagggccagcgcggcccgacccccagccgttcctacgttaacttctacaaggccgacgtcaacgactagagccgatacccaagttctttgacgcaatgtgccggcgactccatgactgggccgccggcacattgttatgctccgttcgatgccgtctggcttattggcgaatggcggtgaacagcaccgactgggccggatgcagcgatggagggcgcaacccgtaggtcatcagcgcccggcccgtcatcagcacgccgtctttggtccaccagcccaacggcgactggccgctgccaagaccaagcccgtcgagatcgagatccagccacaacggctgtatgcggtacgtgccatcggggtcaagaccgggcacgcgaatcggcgccgcagggagagtctgggacgttgtcagttgcgtgaaccggtagaacgccgcggaacgatccggcttgaccatgccgtcgacccggacggccggatcggcgatatcggcgtgcacgcacgtgtcgatcgcgaaccatgcgcggtgcctcttgtattcggcgacccattcgccgagcttgttcaacgcctcgtccggctccttgagcagattccattcgacgcccatgtgcccgaagaacgccatcgccatgcgcatctcctggctcgtggcgcgatgcgtggaatgtgcaggactcgcccccacatgctcgcccatcatgcagggcggcacgagcagcgacgtgtaccgctgaatatcggcccgctcgaccgggtccacgcagtcggacgtccacacgcggctggcgaattcgagtatgcccaggtcgatacggccgccgcccgatgcgcaactctcaatctccagtcccggatgcgcgacttcgaggtcacggaacatccggtacacggcgagcgtctgcccgtgcaccgccggcctgccggtacgtggcgagaccgcctcggtgacgaatttgttgtggtcccatttgatgtagtcgatgcccaactcgccgaccagcgcatcgatggaatcatggatgtatcggtaggcgtcgggattggtcaggtcgagcacttgctgcgagcgtccctgcatcggcagacggttcgcagtcgggcgcagcacccagtcagggtgggcgcgggccacgtcggaatccgggttgaccatctccggttcgaaccacaggccgaactccatgccttttccgtgcacgtaatcggcgagcgccttgaggctcttcggcccgtccggccacacatcctgcgctatttgccagtcgccgagcccggatgtggagtctcggcgggagccgaaccagccgtcatccaccacgaaccgttcgacaccggaatccccggccttatcggccagagccttcaacgtgtcgtagtcatggtcgaaatacacggcctcccacgtgttgagaatcaccggacgtggcttgacggcgagatccgggtgacaggagcgcacgtaatcatggaatctcgcagccacctcgttgagcccgtcaccgtacgacccgtacagccacggggtggtgtacgtttcgccgcgggcgagcgtggcctcgccgccgagcagcacctcgccgccgccaatcagaccggtcgtatacggctgacgctctgccgacagcacggaattgccgctccagcccacatgcaccgaatagacctcgccatgctcgaacccgaagccgggctcgcccgcggaaagcaacagagaggcgtcaaaacctgggcgccccgccatcgagaccttctcgaagcgtccttcggtcagcggctgccgctgcgggctgcgttcgcgcagatgatggccggtggtggtgagtatctccgtggcaagtgccgggagcgggaagccgagttcgactttaccgacttccaagtcaccggtcagaagattaccggctggaagattacgcagcgtggcgcgctgtctgatcagtccgccgggcaacagttcggccgtccatgacagttccacgccctgctcggtatccgacgcggtcacggtgacgaccggcacctgttgcgtgacggtatgcgcggcaccgtccacgccgtcggacacgtcaacgccttggcgttcgtcctgacggattgcgatgccggtcaccgtgaatgcacagaacggcgctacgccggcgcgccggatatccagtcgcggtgcccctatccacgactcgctttgcgtgggcatgatgcttggccaggcggtctcgtccagcgcgccggacacgcgctgcggccgcagggcgtcgtatgcggcgagtacggttcccggcgccgcgagcgggcggccccagtgcacgaagcgcggaagaccgtgaccggcgaagatcagcgcgaacgccacatcagcagccggctgctcagcataaatagcggtgagttccgttccatcggcggcggcgccatggaattgttcgatgagtgacattgcgaatcccttcggaacgtgccattgatatatggttcgcctccgatgctacgacatcgttccgtcatgtcaccgcatattcagcgattccggggtatgagaagggctcccgttttccgatgtggagagcgggagccctgactgccggtggaggcttatggcattgttatgccatgatgccgcgcttgcggtcgatggcgcgcatgatcgccttgtagatttccgaggcgatcagtacgaccgcggcgaggcagatgcactcgacccatgcccacggtccgagcggcgtggtgccgaacgcggagttgaggaacggaacgtagatcaccacgagctgcagcacgacagacaggccgatcgccccccacagccacttgttggagaacaggccgacgaacgcggactgacgtgcggaacgcgatgcgatcgcgttgaacagctgcgcgaacacgagaatcgtgaagcccatcgtacgggcctcgatcatctggaattcgtgggtgccgccgatggagcggtcggtgaacaggccaccttcaaggtgcatgtccatgccgatcaaggtgacggccgccatgatgatgccgatgaacgcgatatcgatccacatgtccctgtcgatcacgcggtcggtgagcttgcgcgggctgcgtgccatcacgtcatcggtctgcgggtcgacacccatcgcgagcgccggggcggcgtcggtcagcaggttgatccacagcagctgcgtggcgagcagcggcacggcgacaccggtggttcccggctgcgtgatgccaagcacgccggcgagcatgacgccgccgaacacggtgaacacctcgcccacgttggagctcagcaggtagcgcaggaacttgcggatgttgtcgaagatcacacggccttcgcgcacggcggcgacgatggtggagaagttgtcgtccgcgagaatcatcttcgcggattccttggtcacctcggtgccggtgatgcccatcgccacgccgatgtcggcggacttgacggccggggcgtcgttgacgccgtcgccggtcatggcggcgatgttgccctggcgctgcagcgactccacgatcttgagcttgtgctcgggggccacgcgggcgtacacggagacctcagaagtcgccttgtcgaacgccgcctcgtcgggcatcgcgtcgagctgatcgccggtgagggccttgccgcccttttcgatgatgcccagatcggaagcgatgcgggccgcggtgagcgggtggtcgccggtgatcatcaccgtgcggatgccggcgcgatgcgcttcggccacggaatcacgcacttcggtgcgcggcgggtcgatgatgccgaccatgccggcccagatcaggtcacgctcgatgacgtcgctctgctcggagatgtcggtcacctggccggctgcattggtcttgatgccggggatatcggccagggatgtggtgccgagcgggcggtacgcctcacccagcgtgcggtatgcctcgccggacagacgctcgacggtcgcgagaatctcctggcggtcgccttcggtcatcgggcggacggcgtcgccaaccgcgatgcgcgtgcagtagccgagcagcacatcgggcgcgccctttgcatatacgctcaggttgccgttgtcgctgctgtccttgccgatcacggccatacgcttgcgctcggacgtgaacggaacctcggccacacggtcgagcttgccgagggcgcggtcggccttgatcttgcgggaggcgacgacgagcgacacctcggtcgggtcgccgacgatctcccactggccggcatcgttctgacgcaagtcaccgtcgttggcaaacgctccgacggcgatggtgcgcagggcttcggcgttgaccggagcgctctcctcgatggcgtcgccacccatgcccagcatcttgcccttgggctcgtaaccggtgccggtgagctgcacttcaccgctcggggtgacgatgcgctcgacggtcatctcgttacgcgtgagcgtaccggtcttgtcggagcagatcaccgaagcggatcccagcgtctccacggagctcagcttcttgacgatggcgttgtgcttggccatgcgctgcacgccgagcgcgagaacaaccgtcagaatcgtcgcaagaccttccggcactgcggcgacggccagcgaaacggccagcagcagcgagtcgatgagatcgtcgggcatcttgtggaagccctgcgtgatgaacagcgcgacgagcacgacggccgcgatgatgcacacggcaatgcccaggatcttggagacgtgggtcatctccttctgcagcggggtatcctcgtcatcggtctgcgacagcatgtcggcgatcttgccgacctgcgtgttcatgccggttccggtcacgatcgcgcggccggtgccctgggtgacggacgtgccgttgaaaatcatattggtgcggtcgcccagcgccttggcggagtcgagcgtgtcgggcttcttgcccaccggcacggattcgccggtcaggctcgcctcggcgatgcgcagcgacgcggcggcgaacagacgcccgtcggcggagacggtatcgccttcgccaagcaccacgatgtcgccgggaaccacgtcggcggtgttgatgtgcacgattttgccgtcacgcagcacggaggtctgcggtgccgtcatttgggcgagcgcctccaccgcctgctcggcacgggcctcctgaatatagcccagcaccgcgttgacgatcaggatcaggatgatgacgatggcgtcgaacggcagcacttcgccggccgttccgtgcgagcgctcgatgaaccatgcgatcagtgagatgacagtggcggcaagcagcaggtacaccagcggatcctggaactgcgccaggaacttcttccacttgggtacgggtggcgcgctggccaactggttcgggccgaatttctccaaccggcgctgcgcctcggcggaactcaggccggtattggtatccacatccagcgccttggcgacttcgttcgtctcggtcaagctgggatcgacgtcgtgaagcaggccttcctgcgactgcacgcctgtggattgatcatttgtgtgatcaaccataatggtctccttgatatagccgcggagtagtcagccctcacgatcaccgggatcgtcccctcccccggtcatctcgataaagctgcgcggttatgggcaccggcgcaactgctgccgatgcatactgttgccattattccacaaacccgtcatcgcttggcgaaacagccctttacgtgttgtccaaatatccgcattccgcgaacgatttcaggcgacacgctcacacagcgcgagcagccagcggagcgtcgccatggtgtaatcgaacagttcgtcgtccatgccgaaataccgctcgcagcactccctgctcacatcgaccatcgcaagaccttctggctctccgggtgtgaatgacgccgcccgatcctgcattcatcatacgtgccaaggcaaggaactccggcggcttcggaaccggacgagctgcgttccgttcctaagtgcgcgccgaaacgacaactctgcgcacttaggaacgcaaactatgcgatctgcgttcctatgttcgcgcactcggcgttccggcgcgcacttaggaacgcaaaccgagtctctcaggagattggggcgattcgcgcgccgcgaatggctgtttggcgtgggggtctgggacaatggcacgtatggcaatcaagaaaggtccgaccaaggggtcgggaggaaaacaccgcaatgcgctacgcggcaaggggccgacgcccaaagccgaggatcgcgtgtatcacaaggcatacaaggccaagcaggcgacgaaccgtcgcaagatggcagatccacgactggcagcccgccgtcgcgccgcgaagttcacgtccgattcggacgatctggtcatcggccgcaatgccgtgctggaggcgctgcgcgtcggcgtccccagcatgcagctgtatatcgcgacacgtatcgagcatgatgaccgtacacgcgagatcatcaagctcgccggcgcacaaagcctgcacctgctggaggccgaccgtctggaaatggatcgcatcgcccggtcgtcgaaccatcagggcgtcgtgctcaaagtgcagccgtaccagtattcgtctctcgccgagctggcggatatcgccgagcgcaaggccaaggccatggacgtggtgaattcgccgagtgcgcgcatcaacgcacgcccgctgttcatcgcgctcgacggcgtgaccgacccgcagaacctgggtgcggtgattcgttcggccgccgccttcggtgccaacggcgtgattctgccggagcgtcgttccgcttcggtcaccgctgccgcgtggaaggtatcggccggtgccgcggcgcatatcccggtggctcgcgtggtgaacctcaccaaggccatcgaaagcatgcgcgaacgtggatattacacggtcggcctagacggcggcggcgataagctggtcggcgaaaccggtttcgagaccgatccgctgatcgtcgtgctcggttcggaaggcaagggactgagccgactcgtgcgcgagtcgtgcgacgcgatcgccggcattccgatcacgtccatggtggagtctctgaacgcctcggtcgcagccggtatcagcctgtacgcggtcgcccgcgcccgtcgcgaagcagcggcagccgccacgaagtaatacccatatctccccctgctgccggcggggtcatcgagcggaacgaaaatcggggtggccgccgcaatcggcgcaccaccccgtccggttccgctcagcagctccacatatcagtggctccacaccgcggcatcaggatcgtcgtcgggattgtaatcatcatcgtcgacgggattatcgtaattcgcctcatcgtcgaccacgccggaatccgcttcagcgttgagctcgttcacggctttgtcatccagcttgtagttcggcagcacggattggatgtagctttccacagcctcgcccatcggcacgtcgtggccggccttctcggcaaggaaccagcggtgatccagcacctcatggaagaactgtgccggctcgatctgcgaacgatattcacgtggaatcatacgcacggtcggctcatacacctcacgcatccaatcggtggcgacgatctccaactcctcgccttcacgccacgtggaggcacggtacgcatccagatcgttgagcaggcgccgcgcctgattctcctgcacatctaaaccggtcagtcgcagaagcttgcgcgacgcatagccggcatcgaccacgcgcgggcggaccagcacacgtttgccgtcctccgcggtcttcatctccagctcgtccacgtcgaagcccaggtcgttgagcttgttgacgcgctgctcgatcttccacatctcatccgggccgaacttgtcggtgtcggtcagcgtgctccacaacgagtggtagcggtcgaccagacggttgcccacctcgatctcgtccacgtcgctcggcagcagacggccagaagccaaatccatcaattcaccgatgatgttggtgcgagccaagtcgatatcgtattcacgctggccatcggtaagctgcacctgcaaatcaccggtttcggcgtccaccaggaaggcggaaaacgcgtcggcatcacgcaggaacaggacgttcgacagcgacacatcgccccagtagaagccggccaagtgcaggcgaaccagcagcacggcaagggcgtcgatcaaacgctcagcagtatccggctggagattgcgggcgaacagcgcgcggtacggcagtgagaacttcaggtgacgggtgaccagaatcgcttccagcggttcgccgttgcggtcatgacgaccggtgaccacggcaatcgggatgacggtcggcaactcgagcttctgcagtcggcgcagaatctcatactcgcgctcggccacctgacgggtgatctctttcatggcgtagacctcatcaccgacgtgcacgaatcgcacgacgtggcgggagatgcctcgcggcaggttggccagcaggtcctcgggccaggtggccaggggcttatgccagggcagcgtgaacatcttcgggttcgagctggcggcggtgatcttcaatgcttgcggctcagctgaactggcatgttcgtcttcggctttgacggacgtggccttcagcgcgcgcggatccatctgaggcaaatcgttcaactccatgtgttcgattctacgtggtgcttgggaagtgcagcgagtagcggcgacttcggcgcattattctcgcatacgaatagatcatctgtatgggatttgccggccgaattgacgtcccgtatgcgacgcctcatgcgcaatctgaacaaaatgaacgcaacaagtaacatgagccccgctgccgcggcaatgctgcctacggcggcacccgtacgaccgataaggccaggattgcccggctcctcgctcgggttatcttcgggcgggacaacaggagttccagtgctaaatttcggctctactgtgatgttgagatcagcggatgtgcctccactgccaggaatcgagatgaggaacggatcacagtcgtatgccttgttggctttcgccgagctcgtgcgggagaccagatataggccgagcggcagattctggaaagtgagctgaccagctacgttagtggtgccggaatgctggtacagcttgtttttcgccgcgtgcgcagcgagcttcttggccgcatcgtgatattcacttgatgtcaggcgttcccaatcggcagtgaggccggaaaaatcgccgacggttttatatgaggagacgctaccatcattgttcgttgtgacggtggcgacgcgcacgatggaataggtatcgccggcaagcaatttgggcgaagccgtgtctcggccccatacggcattgatggtgagagcgccgaaagaatcagcttgcgcatacggcaccatagagccgaaggctgcaagaacagtgaggacgatagtaacggcggcggcaatcatggcagcaatgcgcgccgcaccatactcgcttccgctatgcaggtctaacatgtctgcccggtcctttccgccatgatgaatgtgattggttatttgtactgtctggctgaggaggcaagtcaccgtccggctcaatatccgcagagtcagaatcaccagatgcgaccttggcgctcccactctgccggcgtcgccgctcatggcgctgccataaatgccatgcgatgagcaaggcaatcagtgcaagagacggcaacaagtactgcagcggaatgtccacgtggaacgtggatttggcgtcatcctgctgctgcggcgtgtatgggatgcgatggccacgcaccagcagccgatgcgtattgaccgcatacggcgtacaagtgatgagcgtgaccaaatccttgccgggctcaattgccagttgtttggtatcggtcggcagaacggtagtgatcttatcgacctgatacgcatacgtgtctttaagtattgtgatgtagaacttgtcgccttttttcataaggttcaagtccgtgaacagttttgccgtgggcaagccccggtggccagacagcgccgcatgagtggacgcgccaccaactggcagtgaggtctgttcgagatgtccgatgccggattgcaacactttctcggaagtgccgtgataaatcggcaaggtctcctcaagcttaggcacagtgatgtatcccatcatgccgtcaccgtcaatattgagcagactgttgtattcctcgtccgtggatgcggaattgacggcactggcaagagcgtcggtctctcccgcatcgttctgggcgagcttttcgttataggcgtgcgcagcatccagcaccttctggtactgttcctggctcaatgcttcaacgctggcgtcgtagttatttacggcgcggctggcgttgcacataatgaggaagttgctgatcgtcggatagaacagaatgagcattccaccgagaatgaccagtaagggcaggatgttgcgcagtcgtttcatcgagcgttcttttcgcgaggaaaccgtgttgtgggcgtagcgggtgtgtgcccttcacgcccaaaacacggccatgctcgtcaggcgttcttgcgcttgagagtccaggcaacgccgagcgcgatgaccagcacaccaatcaccgtgaaggcgatggtacccatgccaccagtgccaggcagggtaacaccggacttgttccggaccgggatgacaccgttcgatgcgtgctcgccgtagacgctgccattgtcgttgttgtaggtgatggtgacggtggcatccgtgttgtcagtgccgtcgttccggccatcaaccttcacgccgatggcgctggcgagcttgttgtagccggccggcgcttcggtctcggtgagcgtgtactcgccgttcttcagtccctggaagtcaaccttaccgttttcaggagtggtgatagtcgtagtacctgtctcaccagccttagctacacggtatacagcgttcgcggtcgcactaccggcattgacttgcacgaagctcatagggtcgccgttcttaggtgcgagtgtgaacttagcaccagcaagtcgagtagcggcatcagtatattggtcaccagtgtacttatcgacggtgaagccataagtgaagacgcgaaccttgctgggttcggactcaccggtgccattggtgctcgggtcgttggagtactgaatcgttgcggagttgacgttaccagcaccgcccacaacagcatccttgttcaacgtggccgtgtaggtgacggtgatcttcttgccggcattgacctgctgcttggtcttgaagtccttcatggcgacagtaagcgtattgttgttggaggccgtaggagtggtgacggtgtagtcagtgttcacggtcagtggactattcgcaccttcgaccttaacggaagtgacttgtccaaaggtgaggcccttagacaacgtatccttgaagttgaaggtgtaggtgctataggcggacatgtccggaatggtggaagtcagggtaaaggtcagggtatcaccgatcttcgcgtcggtggcgtccttaccagtgccgtttacctgtaccttcttgtcgacggtaggcaggttgcccttaatctcggcagtcacactggtgctatgaacggaaactagcgtggcgtattgactactggcgttggccaaggtcgcacccggcacagcgaccacgtagtagccgtagtcgagaccagtgaacgtcgcagtgtacttactgttcgaggcatcggcagataccgtagcggtcgcgccaaccgtgatgttgttggccttggtctgcgcccagttcgatgccttggtagcgaaagcaaccaaggcattaccagtcagcttggatacgtagtcgtttgctttatcgttgatgttcgcgtcggtaacatcagttagtccggaagcagtggagttcttgaagaacggcttccactcgtcagtcaacgtgtaggagacagccttgccgtcaccgctcacggtggcggagaacatcttgtaggcgttcacggtcttaccggcgaacttcgcgtcagtagtgctgaccgtcagcgtggcattaccacccgctgcgttggccgtggcgactgtcgtcgcagccaatccaaatacggtggcaatcgccgcggcggcagcgaaaacctttttcatcagtgatttcattactgttcctttctctagatggaaatcttttctgtttggcaggtacggtttgtctatgtggtcgtcacgaggcatgggcacctcgctttcgtatacggctggagcccgagcggactgtgccggattgaacgcgttgattacgcacgtaccagaccacgccagctcccataagcagcaagccgaacatcaggaaccacatcgtgcccgcgcctcccgtatccggaagcaacgccgcattggtaacgatggccacgcgttccttggtgttgtaggagaccgatacttggtatccggcctccgcgggcttgatggtcttggtggtatcgccgtccttataggtcacggcggtttcttccacggtgtacgtgtagtaacgcacgatgtccttgccgttggcatcctgtccatccacgaatgcgaccggcagtccttgaatcaccttgcgccaggtgttgctccaggaagaggcatcggaggagtccaacgtcaccgtccatggattcttctgcgtcacggttgtgcaatccgcgccgaagcattgaatcgtctgcggcgtcaccgtattgccactgccatcggtatagtgcgcggcgatcttcagttcgaccgactgcggccgttcgaggttgccgtccttccataccttctggacggtcaggtcaatggttcggcaaccgtccttgccgcacgggtcctggccgtcgtccggttcgggggtgagtccgccgttgttgtcggtcacggtcgcgtcgagcatgagcacggccttggccggggactggtaggcatcgagcttcgtcttggtgctgccgtccgtggagttgaccacggcgtccttaatgccgacccaagtggtgccggcgtcgccggatgcggagctgtgcacagcgctgctgtcgtatgtgttgaccacgtcgaacagcttcacttcccaacgatcgagtccggtgttcagcgcatcgtctgccgtgttcttctgcgagaagatcttgttgccgtcctgtgcggaggtgcgggcctcactagcgttcgcggccgccttgcggtaaatgcgataggtgttgtatgccttgtcgccgttgccgtcatcgaccggcccaaggatgtcgctcatggtgttgaagtcccatacggacttgagtttggtgttcgagaacgggtcgaccagtccgctggcaccgcggatcgtgtcggcgtagaccatgtggtcgtctgccagcacaccctcgtcgttcagtccggcgaagccgcccgtgtagcctgtggaaagatccttcacaccgtcggtatcctgagttgcccctccgccgaacacgtcatagccactggcgatgcccgttacagtggactgttccacgcgagtacggttgcccttgatgagctggacggtcaggttgctgcccgacccattcatatcaatgccgtctttactgcaaggcagtttgatgacactatcgccgatggtgacaatcgccacgtcggtctgctgctggttttcatcatcagccttggacagagcaacgctcaccttcagtccgaacaggttcacgtacagcacgttgccttccgaaagcaccttgagatcgaataccttgccgaagatggccgggaaccacttgcctaaatcgatgacgccgacctgttccgccttgtcgaggtacaggagcttgaccagcgcgttcaccacttgcagcagcagttccacaagtacggagttgaccttcgcgtcaaccaaataggcacggctggtttcaccgacgaatccgccggcaatctcaccgctagtgaccttcttgagattgccggatgcgcagcccttcaccctggccaaatccacgtatccaacaaaaccgcctgcgacctcgcgtccggtagccttgtcggtggctttgccgtaattgtcgccatggtgtgtggcggtgacggtataaccgtccgggatgccggtgacgcgcgaatcgccaacgtgcgagccccagatgtcaagtacgccggccgtggcaccaagcagattgagcgcatccgtgccgagctgtgcattgtcggcggcgaccgtgccggatttgccaaggtgcccgatgaagccgcccacgtagttcacgccggtcacactgttgaggttggtgaccgcagactgcttcacagagccattgatcagtccaccgccgaagccaccggccgcaccggtgtaacgcttcgagtcaagcatgccctttgtggtggaatcatgggcgacaatctggatgccgtcgctcacgccgttgacctgaccgtcatagatgaaggtgcggaatgcttcgagcacgcccacgttgccgaccttgagcagtttgagcagcaggttggtattctgcttatcgccggcctcgccgccgccgacggaagcgacgctggatatatcagcaaggccaaagaagccaccggcgtattgcccgccttcaacagcgcgcagcccgttaacagtaagagaagccgggtcattgttcggatccgcttcactgccggtgcctttggcggaatccttgtcaccgaggatcgcggcttgcaacgaaccagcgaaaccgccggcgttcagggcatacttggttgtggtattacccttatcgtccttgctctcatatgcgccattgaccgtgtatccccatgccgggtcatccgagctcacatgtgcaccgcgaatcgtcgtaaccgtggcctgcaatacgctgaccagacttgccgggttcgataccagcgagtcgaggattccttgcaggaatccctcggacgcattggtgtccacatccgcaaccgcaccggcagtggccacgccgatgaatccgccgacattgttgcgcccttccaccttgcgcaggttggaaacgttggcaccggcagcggtgacacccttgacaagcttctggccgttctggccgagatcgccccagatctggccaccgaccgcgagaccggcatagcctccggcattaccggtaccgtgcgtgatgtcttcgccggtggccacgaccttcatacccttgcggtagccggccacgctcgaagatttgatgactggcacgaatacctgtgccacgtcgagcatctgtcccaaatcaagtttgatgcctttgtcgccgaatagttggatggagccgaacgaggatgccgagccggattccatcgtgcccgcataaccgcctgccgcacgcatggcggagacggtcttgacatccatcgactggccatcggtgatcgtgccggtgcgcatcagaccgacgtgtccgccggcgatgccggaatcatgcaggttcgcgccggtctgatactccgcacgaccggcgacgacgttgaatccgaagatgtaggattcgaggaacttgtccagggaatcctgatcagtaacagagcccgcaccatcgcccgtagctacctcggtaaattccttgccatacgcaccgtacttgccgatgttgtcgacccacgtcttccattggtcgtagctcatattgcgcaaaggaccagtgaccttcgagtgctcctcggtcggatagaccacggacagcacgccggcgagattgccggccttgatgagaccgccaagcaaggagagcgaaccgccttgagcggtatcggccgcctccatgaagccggtgtaaccgccggcgatttcggcaccgtatacactgcggatgcgcgcggcgtaggctacgcgctgcggcccgttgtatttgccgccggtattctcctgcttccacgctgctgtgttgttgccccagatatgaccgccacgattacgacctgcatagccgccggccatgccgcggcgtgtggtcgtatccgatgccgcctgggcacgcaccgcgccgccgcacactgcggcatcggtcgagctgttgcgaatcgtcggcgtgaagtcctgcacgagcgagagcaggttgtcgaggttggcaagcttcttgagcacgctgccgtcaccaagcacgttcgccacggctcccggctgcatggcgcccacgtaaccgccggccgaaacctggccgatgatgtatacgaactcatgagagctcgagtcctgaatgtggccgccttcgatgtctccggcgaaaccaccagccatacccagtggatcgggctcattgttggcattcctatgatctgcggcgctggccagaacagagtatccgccgatgccgccagtcacatcggagtgttcaatcgtcgagacgacgacatccagcacactgagtacatcgttgagattgacgttcttgccgagcagtctcaggccaccgcccacagctgccgccgagccgatgtccattttgccgatgtaaccgccggcgtattgcgcagcggtgactgcatatgtgctgtctttgctcagataggtgtcattgattgatccggcggtttccagattcttcggtgccttgacatcagtatggcgcagttgggtcacactggaatgggacacctgcacaccggaaccgtatccgatgtagccgccggcggaaccggattgcgtatcggattggtcaagtcgggtggcggaaacggtgaagccgggatcatccgggtcggaaatcccgttaccgctagttgcctccacggtggtggcatcggaatgcacacccgcataggagatgaatggcacatagccctgcaccacctgcaacaggttggcgagatccaccgtaccgaatttgccgagcaaactcaggccgccgttgccagccgaagcgagcgcaccggagacaaccttgccgccgaaaccacctgcgtatgcgccgccggtcacatggtcaaggttgacaacggccacggggttggtttgcacgcgggactgtacaccggccagcgttgagtcgttcttgagatcggtttcggagaactggttgaccttgccgctttggaagtttcccgcatagccgcccgcgatatcgccttcgacataaccgccgttgacgtatgtcacggtggtatccgtataacttggaatcagatacggtacggcaccgagcaggtcgttcacggacagcaggccgcctttgatcaggccatccaatacgctggaatcttctgcgttgctgagcgcgtcggcgaggccgccggtggtggagaagcccacgaaaccgcctgccacaccatcggacgtgctggtatcggctgtgaccgatttgaggtttgtcacatggctttcccgggttttggtgctgttggcctgaccatagaaaccgcctgcagcgtaatcggttgtttcgttgttcttgttcttgccggttgccgcaaccgtgaatccgccagagacgccgttcacgttcgatgcagtgactgcaaccgaagaatattgggcaaccgatagcagaccggaaagcttgataagcccaagcacattgagaccgccagcgccgatggcgtcgcctggtccagagaagccaataaaaccgccggcttctcccttggccgagaccgtggccagatcggtaaggttcgtgtgggtcacgtcgccgccggtggcgcatccgatggcaccgcctgcataatatgaaccagccgtcactgtcaggccggatgccggagcggtgacagacatgttctccacggtgaacgcggcaaactggtcgaacttcttgagcatggcaatatcgccaattttcaccacactgttgagcaacccagctaccgttgtcggttgcagattgccggcgatgccacccgcgtaggagcccgcggccgtgaccgattcaaggccttctatggtggtggaacgctgctgtgggaagtcacgacgattgttgtacttccagaatgtgagtttttgaaggcggttctgcgaggaatcaccgatcaccgtacccgaaccttcacccacaaggccgcccgcgtaatcaccgccggcagcaactgtgaaggaacccttcatttgtgtaccgagaatcgcagaaggattcacaccgacgatggatagcagttctcctgcaccgttattgctgccgctcagcaatttagtcacagccttggtgagctgtttcaacagcgatgccttcgtggtatcgtccgtaccgagttccaggccccatcccacggaggcgaatccggtgaatcctccggcgtgggatctgtcggcagtcacggcgaccgaagccgtaatcgaatcattgacagcataggcattggccatggcaccgttgaagccgccggcgtagtcttcggcctgcacggtgatcttatcgtcaccgtttaccgtcaggccactgttttcgatgaggctctgcggacgcagcgcagacagcaagtcgacgccaagcgagttaatcagaccgcccacgttgccgttgcgacttactccggcaaaaccaccggcatattgcgttgcccgcacggtgaaaccattcgtgctcgtcaccgaagagttctcaatgattgcaccaatctgcgcaccgacaaagccgccggcctgcgggttgtccttgttgccgatcaccacgttatttttgaacccgttcaccgaactattcgagataaccgggttgtagtagccaaccggaatcaaggcattcagcccgagcgtgccggacagcaaccagtccaccaaatcgcccagcccgaggaacgggatgacgttcagaatcttcgagagtaacttggtgagcgctcctacgatgccggagactgcatcgtatcgggttgcgccctcaacatatcccacgaaaccaccggtcatacggcttacgctagataccgaaacatctgctacctcgcagtccgtaaccttggtgtccccgtagatacggccggcaaatgcacccgtggcgaggttggaaggattgtctttgtgcagggtgagcagaccttgaagattgaggtcaagatctacttgtccgaatgtcaatagttttaacgccttcaacagtgtgtcgagcagtaatcccactgccgaagtgagcataccgagcaaggtcggcggaatatacgattcactcgtatgattcgtcaccgacacatcctgcagcttgaggttcgacaccacggccgtaccggcgctgcccagactgttgctgttcatcacggtcttgttcgtgatcgaggcgaagaagccgatgccctgctgcttgctgacatccagctggtcacctttgacattagagaccatatctttctgattgacgaccacatggctgatgaccggccgagctgcggtagcgtgaaccacgctttcgccatcggcaccaacagccttccacaggctggctgcggtgtcgccgtcattggagaccgcaccgagcatagtgccagagaacatgagcggagtccactcggtgttgttggtatctgccgcgttcttggacaggttgatgtcacggaagatcaggtagtcggcgtctgcggaataggtcaggccggtgttggcagcggagtagtccgtttgcgtgccatcagcacccacgccgtaatacttggtgcgggtcctgttgacgattaacgccgtgcatgccagcagtgaactgtcgtggtcggaggcatcagcatcgcgcaaagtatctgaattggagagatcggcgtcaccggcgtattcggaagacggcgtgccgtccacccactgataattgaggggcccttgtcgcgtacaagtctgcttgaccttgttgatgcggccaataaccttcttgccagaaccaatcgcacgcagctgctgctcgttaccaatcaggatgtaggtcttgccgttgatctccttggtgacctgaccctcaaagtcacggccgccaagcgccgtcgcggcgacctgcacattggccttcgccggcgattgatccgtcgcatttgaggaatcgttcttggcatcttgagaagatgcatcgtttggagcccgcgtttgggctccatcattagcggaattgccagcggtagcttctgctgagtcgtccgccttattgtctgtcgcaccatttgaggattcggaaggtgttggcgcaccgtttgatgtattggcctcttctgacgtcttatcgtcaacgttgacattgcgagcagaaggagcagctacgacagtattatccccccccccagaaattacggcgttaggagagctactcacatcgtctatattctgagcatatgctgcaggcaccatgcacacgatggacaaggaaacagcaataaccgaagcaaggcaacgcttcaaggcatggcgctgccttccagattcctgttctgttcctccgttaaacccgcagcggacgaacttcgatttcgagcccattgtttcccctcatagattcgcaatccctttttcgggaggtcactgcatacaattatacaaggaattattggcccgttgtctaattgaaagtgcaacacccgttattggagattgtccagataaccagtccgaagggatgttgcacctatggggaaagtatatttcgcacctgtcggaagaggaacgccaggtcatccagatcgaggtcggcaacggcacgagcgtcaggaagatagcccgtttgctgggacgcggcccgtccggcatcagcagggagatcaggcgcaacacgtggttcccgtccaacgagagcgagtcctaccggccgtaccggccgaagcgtctgaagacgggcccgtggacgggccgctactacatcgccggccccgcgcagcgcaaggccgaccggcgcagggcgaagccgcgcaagccataccgcctgtcattcggccgcctgtgggcgcgggtggacgaatggccgggtagaggctggtcgccgctgccggtcagcggcatcatccgccgttacctgcccaaacgcacgatcatcgaacccggtatggcaagagggctccaggagatcgtcgacgagaccgacaaccgtcccatgcgcgtgctcggccaccgcacgcccgccgaggcattcgccgacgagctgctaaacttgcaagacaaacaaggatgttgcacttctaaatagacaacggggacaaaagaacaaaagttcatttgcgggggccggttagcgtatgtctttctgggcaaaaagaaaagccccgcaactacgcggggcttttccaacgaggccataagagaggaagagaatcgcctcgtttaatggttggcatgaccgaagtcataccaagtatctgctagttcctctactagttcagacgcagctcggtcgacggagcgaacaggtgcatcttggaggggtcgatcttgatcttgacggtctggccgatcttcggcagcgcacgcgggttcacacgaatcgtggtgagcttgttctggtcggacatcatcgtggacgcctcggcagcggagccatcggtgatgatggtgccgtagatgtagccgtcggagcccagatcctcgatgttctgaaccttcagcgagaaggcgttcggatcgtccggggtggccagggtggcatcctcgggacggaagccgacgacaatcttgccgccatcctcagcggtcagcttgttgacggcctcggcgggcaggtcgacggtgtcctcaccgatcttcgccttgccgttgacgaccgggtgagtgttgatgttcatcgacggggagccgatgaagccagcgacgaagacgttggccgggcgatcgtacagctcggtcggagcgccgacctgctgcaggacgccgagcttgatgacggcgatgcggtcgcccatcgtcagagcctcggtctgatcgtgggtcacgtacagggtggtgacgccgagctgacgctgcagggcagcgatctgcgtacgggtctgcacacggagcttggcgtcgaggttcgacagcggctcatccatgaggaagaccttcggctcacgaacgattgcacggcccatggccacgcgctgacgctgaccaccggacagagccttcggcttgcggtcgaggtactcggtcagatccaggatctcagcggccttctcgacgcgcttgcgaatctcttccttcggggtgccagcgatcttcagggcgaagcccatgttgtcggcgacggtcatgtgcgggtacagagcgtagttctggaagaccattgcgatgtcgcggtccttcggctgcatcgtggtgacatcattgccaccgatgaggatgcgacccttgttgacctcttccaggccggccagcatgcgcagagtcgtggacttaccgcagccagacgggccgaccagcaccaagaactcgccgtccttaatgtcaagattcaaatcatccacagagggcttatcgttgcccgggtagatacgagtgacgtggtcgaatacgacttctgccatgatattcatcctttcagaggcaggtacgtgcctcacgatccgttgtaaagggattactatgccttgatcatcagtccctgcactggcaacatcaaaccgcagcgttctttttccttcggttcattgaagactctcttcgttgagccacgtactactatacacgtccgctggaacacgtcaacacgcgcgtctgaaacgcggacgtaacatcgacgggccttcaaccggcatcccgcagccggcattatccttactccggcctcatctcagtccccctcctcccatccatctcccgcctctcccctccccaagtcctctcctctttttgcgttcctaagtgcgcgccgaaacgacgaccgtgcgcacatagggacgcaaacagggccatttgcgtccgtatgttcgcgcacttgtcgttccggcgcgaacttaggaacgcaacggcgcttccggctcaatcggcatgctcgaatatcgggtgcgccccagcacgcggcacaccggcctgcatcagcttcatgacgaacggcgcgcgctggaccacttcgatgtaattcgtccgtatcacaacgctcactccggcctctttcagatcctgttcgcgctgcctttcgtcacggaccacctgccgaacatcccggttcgacgtcatctctggatcgatgtatttctgcataccgtcaaactccagcacgatgatgcggccatcttccgtatgccagatgaaatcgacccggcccgcctccttgccggtcacgcggctgtaaaacgtatgctgcaattgcggaggaacaaacccttcttcgatggatacagcccggcagaacgactcccctccgttctcgctgcgagcatccgcataatgcagcagacgaaataccggcccacaatccactcgcagaccatcacagacggcgacgatctcctcgcgggtcacgagcccccggcgcaacgcggaatcgaacatcgacagcacgtgctcgaacggatacaagagcgcgcagtccaccaaggttcttgccggactggtcacacgtacctcgccgatacatacattgtcacgcaatgcccgttcgtgggcgatccggtcagccaacttgctcacctgactccaggtattcgacccgtcctgtgctgctccatcaccgcgaggccggtacaaacggaccacatggcagtcctcccgtatatcggatctacgcaccgagatgcgccgcagccggtggtacgaccgacgtgacttggtgaatccgtcagtcgcgatgtacacgtatggctcgtcatgcaacgtccatgagtgctcgaacccgtagatgaccgccgcgctcagtccggcgaatacgcgctcgggatgccgtctcgccatttcgcgaatgacatgtgacgcttgctcaatgggattcagaccatcccagtattcacgacgcgcgtacacgctgcgaaatggccgcacgacatcgccgcaacgagttcgccgcagcatcgcctgtcgttccgccgggctggacgcggaacagcatcgcccgtccatttccgcccggttcatcagatcgtctagatgcttgtgctgtctcatatgttgatgatgacaatatggaccgccgctgcgcaagcgaatccggggtatgtggtcgaaggctaggcgattgtggataactcggcgcgtcgcggcggcatcaacggctgtgacgacacatttgcgttcttaagtgcgcgccgaaacgacaagtgcgcgaacttaagaacgcaaaccggcccatttgcgtttctaagtgcgcacaatcgacgtttcggcgcgaacttaggaacgcaaacgatatcaggggtagagagaacgggcacagggcggtgagtaggataggagggtatgagcgatgcgttgaatttggagcccggagcgttggtcggcggctacacgctgatgtcgcggctgggatccggagccatgggatcggtctggcgcgtgcatgacgacggcggcgaggaatacgcgatgaagatattgcgcgattcgctcgccgatgaccgttcgacggcgtccgcgcgcgatcagatcacggcacgtgagcggttgcgccgagaggcgatggcgttgaagaaagtcaatcatcccggcgtgtgcggcatcgtggacatggagttggatgattcgctggcgttcatcgtcaccgagctgatcgagggcaaaaacctgcgcgacgacgtcgccgcgaatgggccatacgtcgccgatgacctggaacgactggcatccaagctgatggacgcagttagggcggttcatgcggcgggcatcgtgcatcgagacatcaagccgaccaatgtgatggtttcggcgaccggcccggttctggtggatttcggcatcgccatgggcgaaggcgaaagccatgtgacgcgcaccggcctggtgatgggaacgccggggttcatcgcgccggagattatcgagggaaccgaatccgatgagatcacggactggtggtccgtgtcgtcggtgctggcattcgcggcaaccggaaagcccgttttcggcaccaagccgatgatggcggtgctggaacgcgaggcgtccggcaacgcgaacctcacaggtcttcccgccaccaccatgacggcgttccgtgcggcgctgaacccggatcgcagcaagcgctgcactccggagcaactgctgcaggcgatcaccgtggacgcgttcaaccccggcgcctggcagcagtacgacgatgacgccgcgcaatccggtcagacggatgtgatgcgcccttttgaccataccggtctgcgcaacccgcgtctgttatggcgcccgcatgagccggccggatcaggtgaaaagccgactgcagccgtcaccaaggcaggaatgccaaggcaaaccgcgatgtccggcgttcggcccgctttgcagcggatcatcggacaatcggcgccctcaccgtatgcgacggttccgccgattccgaggctcccaaacgccagccaagccgctgacgctgcatccgccagtcttcgacggctaccatcaatcgggacaggagcagatgccggaacctcggacggaaccgtaccgctccgggaagcaccgctaccgggaaatatcgcgtcttctcaggcacccggcaacgaccggacggcgccgatgccccgcctcaccccacctatgccgccgaccatgccggtcggcaccgaagcgaccgaatcgttgcgcccacagccgacatcggttctgcctgcctccaccatgccattcgattccacggtcagcgtcggacgaaccatgcccatgcaaccgcagccgacgacggccctacccacggacgatgcggacatgaccggagcaacggccgtaatcgagccgtcatcatccgccgacaccgcggcaaccctggcgatggatgatccagtgtggtcggggcgccagcagatccccaccatgaccatgccgccgctgagcccccagcagatcttcgccgaccctgatgaagccgcaacgccgacgaccgcaatgcaacccagccagcccgcacagctccagccagccgcgcaattccagccgtccatgcaagccatgccgacagcgcaggccatgccgccgatggccatgaacccggcagacatcaagcgccagacctatctgcgtcaaggcacgccgctgcttgccgcatgggcagcgcccatagccgcaatggccgcgagcatgccgttggcggcaatggtcgcagccacgttgctgtgctggctgctgctgacgataggctattcgacagacgcccagctgcaacgcgaatacagacgcggcggcacacacagcgccggcgacaccgcgatgcgcatcatcacgctgccatggcacgccctcagggggttgcctgcggcaatagggcgcgggctgctcgccgtcgcgacgctggcgctgggatccaccctcgcgacgctgatcttcagtctgccggtcgtaaacacgcggttcgccataggcggcatcaccattgtggtacccatcatcgccgcctcccccgtgtccccgtcgggtctggctctggccatctgcgcggcgatcagctggatcatcggtatgctggcgcccgcaccgaccatgctgcgacttggcaccggcaccctgctcggtctcaaccggcccacgggctccagcggcgcaggcatgctccccgaatcgtccgacaacgaaaccgctcccgcgatatccgcccaacattccgggcgtaaattcgccgtatggatcgcatgggcggtgattacactctcagcgtgcacgctgctcggtctcggacagggcatcaactggtggccgctgccctccaacgtcgcataacatccccatcccagctgcatgccgagcgacggcaatgcccggtttgtagccattgtcacgttccatcatgcggcaaacggcgcaacccgccgccggaaaagcgaacccttctactactatgggcaacaaaccggcaggaaagggataactgtggcacaaaagaatcagaacgcgaagcgcaacaccagggcaagccgtcgcgccgccgaagagaaggcggcgcaggagaaggcggagcaagcggccaaggagcgcaagcagcaaaccatcatcggcgcggtggtcgtcgccatcatcgtcgtgctggtggcaatcgccggcttcgccatctatggagccattcacaagaacgacgtggcgaagagcaccaccgaggagcaggcataccagcagctgcaaaaggtcgagaccaagccatcggcggccgacgacaagggcggcatcctcatctccagcgaaggctatggcaagaaggtgtccggcgcccccaccgtcgccgtgtacatggatccgctgtgccccggctgcggcgagttcaaccgccagaccgatcccacgctgatctcgctggtggacgcgggccagatcaacctggagatccacccgatgtcgttcatggacgaatactcgaccgacgaatattccagccgcgccaccggcgccatcctgtacatcgccagcaatgacgacaaccccgatcacctgctcaagttcatctcgaacatctacgccgaggacttccagcccggtgaggccagcgaatacaagtcggtcaagaacaaggcgctcaagcagcaggcgattgacgccggcgtaccgcagtccgtggccgacaaggcgttcaacggcgaatacaagaaatggatggatgccatcaacctgtacaccccgaagcgccccgaactgtggcaggtgtccggttcgaacaagggtgtcatgagcacgccgaccatcaccatcaacggcaattactgggatcgcaaccagctgtcactcgccggcatgaacaacaagaccggcatcatcgcgtcgctgggcctgaaggaagacgaagtcggccagaagggcacgatgccgtcgatcggcgaatcgggcaagccgatctcgctgacgaccggcgaatgacgaatgacccgtcatgccccgcaaatgaacgatgacacccacgtagacccgtgtcgcgctgtgatcttcgaccccggccggaggaaccgcaacacgggtttgcgacattctgaattgaccagcgcggtgaaactggtaagctggtcaatcgttcgatgacacctgtccgcattgtgcgaatggggtccgcctccttagctcagatggccagagcggccgccttgtaagcggcaggtcgtcggttcgatcccgacaggaggctcgcggcacagcataccgcgtgtcatgtgcgatgcacggtcgacatgtagtaagctgtgtttacatatagtcttaccttgtgtaagtgccagaagccttcccccaacttatggcttctggaaggcagagcgtcccccaattagctctgcccacagggggcgggacaatccccttctctcccgcccccttcttctttattttgatatatatggccaccccagtagctccgcgacagcccttcgggcagggcaaaaagtaccaaatgtgggagtatgggtgacggtcgtgcgatgcccagcgaagcatcatcgtgattggttacaatgctagccgtagctcatggaaggatgacatatggccaggcggtggacaccacgacgttttgttcgattgcgtcgcattcgggtggcgatctgcgccgtcgccgtggctcttgcctcaacggtcgcattcggcgtcgccgcacgcaagaccatcgcactcagcatcaacggcgacacccagaccgtcaccacgtatgccatgagcgtgacgcgcctgcttgaagagcggggcgtcgacgtcaaatcccatgatctggtgcaatccaccagcggcgacatcctcagcaatcatgacgtggtcacggtcagcagcgcatatcagacgaccatcagcatcgacggacagcgcgtgccgttctggaccgtggcgaccagcgcctcccagctgctcgggtttttccagcagaacgagaacgaggccgcgaaagtcaccgtggacatcgacaacatctacagccagctcaccggcggcctcgtcatcaacgagtccggtccagtgacggtcatcgctgacggcaaaacgtcggtcgcgccgaatggcaagcttcccgccgcgtcgattctcgattccaaaggcatcagcctcaacaaggaagaccgcgtcagtgtcgagaaggacggagacaagaccgtgctgcgcgttcagcgcgtcacccacgggcaggagacgacgaccgtcgccattccccatggttcgcagacgattgttgataagtcgttgaagccaggaacatccgtggtccgccaacagggggaagacggcgagaagaagcaggtctataacgtcacgtatgtcgatggcatcgcagagactcgaacgctgatttcggagacgaccaccaaaatctccctcgacaccatcgtcgccgtaggcccggagaaggccgccgaaccttccgacaccagcaaggggcaagccgataaaggcagcgacaacgccggcaagtcgggcaacaagtcgaataccggcaagtcggatggcaactcctcgaacggcagcacgtccggcgcaaacaagtcggatgatacgtcgaacaatgacaaaaacaacgacaagaacaacgggaattcgggcaacaacggcaactccgggaactcagggaactcaggcaatagcggcaactccggcaacaacggcaactccggaaactcgggaaactccggcaactccggcaacaacggcggcaacggcaactccggcaactccggcagcagctcgcagggacgcctatggcacccgaccgccgcgcaggccaaagcctacgcatccggcgcggccgcacagcgcggctggaccagctacgactggacatgcctcgacaagctgtggacccgcgaatccagatggctgtggtacgccgagaacgcgaagaccggcgcctacggaatcccgcagtcgctgcctgcgagcaaaatggccgagttcggcgcaaattaccgtgacgacggcgctgtgcagatcgactgggggctggcgtatatcgcccgacggtatggcagcccgtccaaggcatgggaacgctccgaacaaatcggctggtactgatagcgagcgttatgactgacatgaatccatcccctgcaccttccggagcatccgcagccgccgagaaacccgcagccgccgggcgactgctcggcgcggccgacatccgtcacatagcagccgaagccggcatcagcccgaccaagaaattcggccagaacttcgtcatcgatcccggaacagtgcgccgcatcgtgcgcgaggccgcggtcaccgccgatacgcgggtgctggaagtcggccctggattggggtcgctgacactggccatcctggaaaccggcgccacaatgaccgcggtcgagatcgacccgccggtcgcgcaacggctgccgcataccatcgacacatacatgccggatgcgaggaaccgcctcacggtcatcaacaaggacgcactggccctcacgtcggcggacctccccgagttcagcggcgacgaaccgttcaccctggtggcgaaccttccgtacaatgtggccacgccgatcatcctgacgctgctggaacgcttcgacatgctgacgtccttcgtggtgatggtgcagaaagaagtcgcggaccgtctgaccgccactcccggctcgaagatttacggcgcgcccagcgtgaagctggcgtggtacggctcggcggaacgcgtgggcaacatcgggcgtcacgtattctggccagcgccgaacgtggattcggccctggccgggttcacccgtgtccagtcgcatgcgggcccgcgcgacccccagttgcgccagctgacgttccagttggtcgacgcggccttcagccagcgtcgcaaaacgctgcatgccgcactcaagcgcatggtgcccgatgaagtgttccacacggcgggcatcgacccgacacgccgcggcgagacgctgaccatcgacgaattcgccgctctggcgacggcgctgaggcaatcgcagcatgaacaggggcaggcatcatcatgagcgccacagcaatggacaatgtacggtcagcgacaccgggtcaggtgcggcgttcgccaagcgtccccgcgcattggcccatccgccgtcatgccgcagccacggaaacgacaccggccgggccgctgcactcggtggaggtcacggttcccgcgaaaaccaatctgacgttgcacgtagggcccgcccatgaggaatggggcggccggcacgcgctggacacgatatattgcgccatcggcgtcaacgacgtggtgacggcgaccgccaagacccccggcagcgggttctcgctcgaactgagcggcgagcatctgggtgatctggcatcgagcggcagcgacatgcgccgcaaccatgcggtgcttgcgttgttcgcgatcgccagggccgcggggcgggagccggacgtggcgctgcatgtggacaagcacattcccgtcggcgccggattgggcggcggatccgccgacgcggcggcgacattgctcgccgtgaacaccctgtggggactgcactggccgattgaacggctgcgtgacatcgccgccacgctcggcgccgatatgcccttctgcctggagggcggatatgcgcatggcaccggtttcggcgagcggatcatcccgctggaggatgattcatcgtgcgttcagacgctgcgagaccgcggattcgccggccaattgctggtgggagcgtaccatgcgcaactgagcacgccgaatgtctactcgaccttcgacaagatgggcgcgggagacggcgacgacaaccatctgcagcgcgccgcggtcgccttgcacccccgcagcggcgaagccatcgaagccgccctggccgccggggcatcccggtcattcgtttccggctccggcccatcggtcatcgcgttcgtaccggacgatgccgtcgcccgccgagttcgcaccgcatgggagcaatccgccacggtggatcgcatcatcgctgcgcaggcgccggcgagaccggtcataaccgtcctgccatccctgtcttatcgcgtcagacagtgacgctaatctgtgtaccagtctcgtaagaaaaggacggacccatgactcagccttatgacgaacgcgcggaacgcaagcgttacattcgccgccgccagcagatcgtattctcctgtgtcggcgcggtgcttgccgtcgccctggtcgtgtcggcgctgttctatttccacgtcgggggtctgggcataacggccacgtccgaagtcaagccgaattacggcgtgcgcgtgccctgctcgaccaaggacgccaacggcaagaaccagacatattccaactatgcgaacgtcaaggtgcgcgtgctgaacggcaccaaattcgtcggcttcgcgaaggccgtcagcaccgcgctgtcgaaccgccagttcaaggtcaccggctgggacaattacaagggcaagaaggtcgagcgcaccacaatctatttcggcaagaacgccatcaacgaggcgtacacgctgaacacgaacttcacggacgcggtgatggtgatggatgaccgcgacgacaagctgattgacgtggtgctcggcgcctcgttcaacgatctggccaacaaggacagcctgccgagcggcgacaccgccatcgaaaacttcgagggatgcgtgcccgtccagtcaatgggcaccttgcccaaggccctcgatcatgaaaaggtggaatgacggccagcatcgtcatgacggcctgaaacccccgatattcggcggctgcctgccttacgcggacagccgccgaaccgtttctcgggcacgtttacagcgacgcgtgccaccgcttgagctcggccaccgcggtgtcatggtcgaccggaccgttatcgagccggtattccagcatgtgcttgtatgcgcggccgacctccgggccgggagcgatgccgaggatggtcatgatctcattgccgtcgatatccggccggatggcgtcgaagtcctctttctccttgagatcgcgcacgcgctgctccatctcgtccatggcggacgagaacaccatcgccttgcgacggttctgagtggtcgcgtcggcgcgggtcagccggttcagccgctcatacagcggaccggcgtccttgacgtagcgtcgcacggcggaatcggtccacggttcttcgacatacccgtggaaccgcagatgcaggttcactaactcgctgacatcctcgacgagatgatggtcgaaccgcagcgccttgagccgtttgcgcgtcattttcgcgccgaccgcatcgtgatgatggaagctgaccttaccgccgggctcgaaccggcgtgttttcggcttgccgatgtcatgggtcagcgcggccaggcgaagcgtcaggtcgggagcgggcacggggccttccggcccggtctccagcgctatggcgcgatcgagcacaatcatcgtgtgctcgaacacgtccttgtggcggtggtgctcgtcgatttccagctgcagggcgggaatttccgggaatacgatatcggcgagacctgattcgaccagcgcttcgacacccgccctcggacgatcggacagcagcagcttcgtgagctcgtcacgcacccgttcagcggatacgatgtcgatgcgatcggtcatgtcgctgatggcggcagccgtgtcgggggcgatgctgaacccgagctgtgcgacgaaacgcacggcacgcatcatgcgcagcgggtcgtcgtcgaaggactgatacggatccaccggcgtgcgtaatacgcctttagccaaatcgctggcgccgccgaacgggtccacgaactccagctgcggcacgcgcagcgccatggcgttcacggtgaaatcacggcgggacagatcgccttcgagcgaatcgccgtagctgacttcgggcttgcgggattcgggatcgtacgtgtcggaccggtacgtagtgatctccaccttgacttcggtgccgtcctcgcgccggcgcatcgcacccaaagtgccgaatttgcggcccatatcccagaaaccgtcacgtccccaatgacgcaggatcgactcgaactcgtcgggatgggccgacgtgcagaaatcgaggtcgtgggaacgccggtgcagcaacaggtcacgcacggggccgcccaccaacgccagctcgtacccgcgagccgcgaacaggtgtccaagttcaatggcttccggccaaacttcgaaattcacacgaggcctttccataaagtattaccgcttttatgcgtattcaagcataccgttaccccacctgcacacggtattgagtaaggtggaagtcatgattacgcccgcagacctcgcgcgcatgcttgcgcatgctgcgggcgaccatacccaaaatccgctcgaacccgatacgttgctctatacgtccgaggctccgcgcacgccgaaaaccgttgtcaggccaccggaaccacgcttccccacgcctgcgatgatgccgcagcgacgggcgggcgacgggccgaccacattcgcgtcgctggacgctcaggagctcccggtggtgcgcgaatactcggccggcggcctggtgttcgacgagcgcggccgtgtggccatcatcgcgcgacactcccgcaacggccatctcgaatggtgccttcccaagggccatatcgaaaagggcgagacgccgcagcagaccgccgtgcgcgaggtgcacgaggagaccggcattctgggtgaggtggtcgagtccattgccaccatcgactactggttcactggtaccagccagcgcgtgcataagctcgtgcatcatttcgcgctgcgccagatcggtggcgacctgacggtggagggcgatccggatcatgaagccgaagacgccatctgggtggatttcgatgatttggatgacgttctcagctatcctaatgaacgcaagatcgcttggctctacgcaaggaaaatgaagcagggatgatcgcgaacagccccgagcacggtcaggccgtgccatcgttatctcaccgaacgacacgcctatggcgcttctttaccatcatgttgctgacatgcgcgatgctgttcgcaggccgcatggtaccggccggcccggcacatatggcgatggcggatgacgagacggacacggccacgcagacgaccgccttgtcgatcaccgaatcgacgcccgtggtcaccgacacatccggctaccacatcaccatcagcatctccaatcccacgtatgccgcgacgtcaccgggcctggtgaccgtggcctacaacccgtcatatacgttcgtatcgcgcactgacatccagcattgggcgaccggggacgtatcaattccggtgcgcaccgttctcggcacggccacggtgccgtccatcgcggcgaacaagaaggtttccgtgaagatcgacgcggcggccgacagcgatgcgttgaaggcgttgcagatgtgggggccgaaaccgctgctggtcacctatcaggcgacccaggcgaccgattctcaatccacgggctcctctgacgggtcatccgggtcggaccgtaccgtcgatccgaacgccaagccgattcgcctgcacagcttcctgaccagatcatcccagggattgcgcaacgcacagaccccgccgatggccatcaccatggtcatgccgttgatgaacaccggccagcaggccgacaagaacgccatcgaccagctggtggtgcatgacaacggcgatgaatccgacacaaaatccacacaatcaggtggcggcggcacggatggcagcacagacgacggctccggcaacaataccgacgactccgaaaacaccgcggcgacgcaatcatcagtgctcaccccgcacgacaatgatgcactcgccgccaaactctccctcatcggcaagcacagcgatttgcagaccatagccgatccgacggcattggcttccgacaccgggcaacgcatcgatgccgtcatgcagccggccggattcgacatcaccgcctatgccgcgatcaacaacgtccggtcgtacgaacaggccggcgtcggcaccggcgcatggaacgcacgatccgcactggccgcggcaccggcatcatccaattccctgcccatcgcctggcaaggcaagggcgattggacccggcaggcgctctccacggctaggaagcagggataccagtacgtcatcgccggtcacgacttcgactccagcaccacggccaccgtgcacacaggcacatacacaatccccacctcggccggcgacatcacggtgctgagcgagcagaaggaactcggcgacctcgccaaaggcaagcccaccagcagtgatgcggacggcgagaccagtaacgcgggacgcatcgcgcggttcgtcgcgcagagcgccttctatcagatggagcagccgtatgcggcgatgaaccgcaacttgctggtctgcttcggcactaatatgtcggcggcgttcatcgacacgctgatgaccgcggtcgaacagtcctcatggctgcaactcaccgacctgaatgatctcattgacgcagacgcctatcggaccggcgacaaggcgctgcaaatcgtcccccaagacagtcatttaagcgagcggaacacccgatcggtcacgtccgcgctggaatcgctggccgaaagccgcaacgacatcaaccgcttcgccacgtcggtcctcaccgaccataaggcatccgcgtcctggatccgcaagatcaaggccgcacagagcacgctggcactgcatgcgctctcgtccgcgccgcgcaacatcgacagtctggtcgacggcgccaaacggctcggcggaggcatgttcggcggcgtatccatcacgccgaccgactccatcaccgtcgtcagcgaaacggccaaaatgcccgtcaccgtcaggaacaaccatccgtatccggtacgggtgaaggtctcatccctcaccgactccatggaaatcgtcacatcgcggttcactgaggtcaccataccggcgaacagcgaggcgcaggtcacgttcgccatccgcgtcgccacttccggccacgccacagcccacatcacattgctggaccgcaacggcgacacgttcggttccgcacagaacaccgacatcaccagcgtgctgcgcatcagcgacatgaccggattcatcatcatcggcttctcgctgctgctcggcctggtcggcctctggcgccaattccatcgaaagaaggaccccgacgaatgagcaccacggtaggacgcaattcgctgatcatggcgtgcggcacggccgcgtcacgtgtgaccggccagatccgcaccatcttcctcgtcggtgcgctcggtaccaccggtatcgcagccaacgcgtatcaggccggcgcgcagataccgcaggtgatcttcaacctgctgtccaccggcgtgttcaacgcggtgctcgtgccgcagatcgtgcgcacgctcaagcagaaggacgcggatgagcgactcagcaagctcatcaccttgtccatcgcactgctgctggccatcacactgctgatggcgtccggcacgccgctgctgacgatgctgtatctcgactccagctggacgcccgcgcaaagggcgctggcgaacgccttcacgctgtggtgtatgccccagatcctgttttacggcctgtataccgtattggggcagatcctcgccgcaaaggggcgtttcgcgacgtatgcgtggagctccgtaggcgccaacgtcatcagctgcatcggtttcggcgcgttcatcatgctgttcggcaacgcgggacggcagccgatgtcgttctggacatccggcaagatagccctgaccgcgggcgcctggacggccggcgtggcgttccaggccctggtgctgttcattcctttgctgcgttgcggcatccactaccggcctcgctggggactgcatgggctggggttgcgttccatgggccaggtggcggtgtggagcatcgccatggtgctgctcaaccagctgatgggcatcgtcaattcgcgtgtcaataccggcgccccgaccgccggcggcgatttgtacggcatcgcgggcaacgcgagctatcagtacgcgtacacgatatacgttcttccctattcgatcatcgccgtgtccatcacgaccgcggtgttcccgcgcatgtcccgcgcgatcagcgagcatcgtatcggggatgcccgcgccgacctcagctcatccctgcgatccaccggtcttgcgatgttcttcttcaccgcggtcatgattgccatgccggtgccgctggtgaaggcgctgattccgtccacgaatgtgcatggggcgattctgatatccgggcctctgatcggtctgctggtgggattggtacccaccagtgcgttcctgctggtgcagcgcgccttctacgcgtatgaggacggccgcagcccgttcctgttcgcggcggccgacaacgccgtgcagttgctgcttctgctgacctcgctgcgtttcgcaccgccgaaatattggacgctcatggtggctctgtcgctgagcctgtcatatatcatcacgttcccatgggtgttctggctgttgcgcagacgattcggtgggcggatcgacggcaagcgcatcatcatcatgcatgtcaaggccctgattgccggtgcggcggcatgcgcgtgcggactattcctcaacccgctggtcacgcgtttggtcggcgcgaaggtttccagcgtcaacggacatatgagctggtggcaatccatcgtcatatgcgcgattctgacgattgtggtgacggccgtgtatgccgggctgctatggctgatgcgcgtggaggagttctccagcctgatcgtcaccatgaaggcacggctgttgcgtaggacttccactgcgacatcggtatcgacaccggctgagtcggagaccgaggaagctcaggcacaaaacgcggaggtcgaagagggtaccacggcaattgcggagaatgataatcattacgatgattattcgctgggtgacgatggaacctcggagaatgacggttccgcggaacgggccgctgaaactgtgaccgatctcgaacggccggttcaggaccagccggttcaggaccaacccagggggattccgtccgacaaccttccgcccagcttcgcgccgacggtcaaccgtaagggccaacgcccgtccatcaagtccgtcgtactgccgaacgtcgcggcaaacgcagccggtgccgcagccggtgcaacggcaggtatcgcgaccggcaacaacgcccagccgcgaattcccaccatactgccaacgccgcatcattccactcgtcaagccgcgtccatcgcggctgcacagccgaccatccccacggctagaatgtcagcatcaccactatctcagcgcatgacagtagagcacggagaaacaactactatgaagcctcaattgggagataccgtcatcggtcgctacactctcgtttcttcactgcgcgaaagtgacggattgaacgcatggatagccaatgaccgcatgctggcgcagtcctgccagctgttcatcatcaccgacacatccgttctgccgcagatcaacgaggcggcttccacgctcgcgctggccaacagccggtactgcacgccggtgctgcagctgcagcacgtcggcgatgccgcggtggtgatcaccgagccggactccggtctggcgctggcggaatacatgcagcgttcgtcttcctcgttcctcagctacgacgcgattcgatcgatcgtgggacaatgcacccaggcggttcaggagctgttggacacggggctgacccataccgcgctgagcaccgataccattcgcgtgagcgtcaatggcgtgcagttcgccgacactcccgtcgccgccgcattggccgatatctgcagcggcatcgacggcgatgtgatgtcgtatgagcagatggcgacgcgacagctggccgcactgctgtacgcgctgctgaccaagacgccttcaggcgcgaacacgacgttcgacctgaatatgctgcccgccgacgttcccacggaattccgcgtgatctgcaagcgtggactggccctgcacaccgaagatggggaaaccatcgtgccgatggcaacgctggccgagctgagcgcgctgctgggcgcgtgggagccattcggcaacctgtcggatcatgacatcatattgccgtcggtcagtggcagcgcctcgatcagcatggtggcgttgcgtgacacgagcgatgacaagatcgtggaactgccggatgggctggttacctcgacgaagctgccggaattgtcgatttccgaagcgggactggcagccggcgccgaggccaggttcgtcaacgagcagcgtctcgcacagcaggcgttcctggctcagctgcccggagatccaccctcggccgatcagccggtcatccccgaagcggaattgttcgaaccggataccgccgagccgtcgaagaccctggcctccctgcaatcgaaggtcggtcagcttatgggctccttgcgcaaggacggggagccggagtcgccggtgacgacatccactgcggaagagaccgcgattgagcagccgatgccggtgtatgcaccgctgccggcatcgttcccgcccgccgccaagccgcgtaggtccgctaccggcgcgacgaaggcacaggcacagtccggcaacggcgtgaacgtaccggcaaacgctgctggtgcgtctggtgttgcgggcggtaccggcaaaccccggacgaccggtgcaaccggcgagatacagagcatcgtggccaatatgccgaatgttccgctgccggaagaggacgacaatgagcgcacccgcgccggcagcatcccgccgctgccgcagtccggtgaggcgcaggtgtctgaaggcgagcaaaccgtggctggaagccatcccacgacccgtgcggctcagcccattgccacgaacgccatgccgcagccgcgcgcgcatatgtcggaatcattggccgctcttgccgccagatccgccaaggccgcggcgtcgggcgacgccgtaatgcccccgtcattcgcagtgtcggcatcggcgcccggagccaatggagcagccatccccggatcatcgaagtcgcgtacgcggatgacggcaccaatcagccgcgatgccctgcggaacatgtctggcggccgtcctgcggcggctccgggtgcgaatgtgccgagtgtgcagacaccggcgcagcgtgcccaatccgacgcctttgatcccacggtcaccgttccgctgctaggcactgatggtacttcggtagatcagctgccgcctatggcccagatcatgccgccgagcttcgcgccccagcaggtgcacgatgtcaacgcagcgaatgtcggacgcaatatcgaggaggacctgcctgaccagccactctgggggcagctcaagatcaaggtcatcgccatcgtcgtcgcgttggttctgctggtggtgggattggtcgccgcatggttcatcctgaacggagacaaccacggtggcggatccgacaatcaggattggccgaacaagaccgacatcgataacgtcccgttcggcaactcgaccacacagaactccacgtcaaagaactctgcggcacaatccgacatcgtgtacatccgcgttctgtaggcgacgcagaagttctcataggcgccccttctactcacgggtaggaggggtgtttcatcgtacgcggtgactcacgctgtggacttatgctgtgggcccgtatcgtgctcatattagctcctccggtttccatgaacacggcatgcctgtttcggcaatctgaaagcgaccaatcggcattcgaggcgaatccatgtcgttgttcacccaccgctggacgaggtcaggtcaactcgctatcgtaagggacatgactgaactttcaaccatcatcatcggttccggccctgccggatatacggccgcaatctacctcgcacgcgccgggtatcgcccgaccattcttgcgggtgagctcacgccgggcggtcagctggtcaacaccaccaccgtggagaattaccccggtttccctgacggcattctcggaccggaactgatggatcgtatgcgcgatcaggcggagtctttcggcgcatccatcgaatatctcgatgtgacgagcgtcgatttcagctcctcccccaagaccgtcacgtgcagcgatggaagccaatatcacgccgatgccgtcatcatcaccaccggttcacagtaccgcaagctcggcattcccggcgaggccgagtattccggtcacggcgtatcgtattgcgccacctgcgatggtttcttcttcaaggacaagcccatcgtcgtggtgggcggaggagacagcgcgctcgaagaggcactgttcctgactcgtttcggctcttcggtgaccgtgttgcaccgccgcgaccagttccgcgcctccaagatcatggtcgagcgcgtgctgaacaatcccaagatcaccgtgaaaatgaatacggtggcgacagccattcgcgggcagaaaaacgccgccggcgcgcagacaggcgctgatgcggtaaccgctgcggcacccgcagcgcagaacaccggaaatctcctctcgttgaagacgactccgatgctgaatgtctccggatcggcattgaatgctccctcttcgaccggcatttccctgtcggcaaaggctgaaaccgcagatgattccgccggctttgtggacattcgcgacaccgtgacaggcgagacgggcacgttgcccgccgagggcatcttcgtggcgatcggccatgaaccggccacgcgttttgcgaagggttccgtggatatggatgacgacgggtacattctggtctccggtgccggaacgcatacttccatgcctggagtgttcgccgccggtgactgcgttgaccgggtgtaccgtcaggccatcagtgccgcaggcatgggatgccgcgccgcgctggacgcacaatcctacctggcctcactgcactgatccaacagcacagctcaacctgtcggcgaaatcaaacctcatcacagatgatgatattgctgcaccggcgggttgagctacacaaataatgcttgcactgtcagtaatcacaaacgaaacgacagactgaccgaaatagcgctgcggacgcttaccagcgccggagaatcgcatcagaacgacaatccgctcaaatctagcgcattgtactgaaccgattgcaactcatattgctcaacagagttttcggtaatgaatttcaggtgcatgcaataggacagtcatacggacggttcattgcgttagtcctctgactgcaaatgccacgacagttgctttatacgcgttctgccggagaggcaatgaatacctctcggcagaccagatcatacagctcatgaacggcatgaccgttgtttcccgttgtgtgatgatggcggctcacaccgttgtgtggctcgcaacctcacacccattttgccgccgcgccctcgactgccgtgggaatcagcatgctgaggatgcgttccatatcctcaggggaggaaaacacgatttcgattcgaccgtgcttttgcgtacccttgatggacactttggtgtcaaaatgattttcaaggttgttgacaatcggagaaccggcccaaggattgttcttcgtcggccttaccttcttgggcacgttgctttctgcgttcttcagcgccacgatttcctcggtgctgcgaaccgaaagcccctcccctatgattcgagtggccagcttgtcgatttcactttcgtcattcaaaccaagaagagctcgcgcatgccctgcggacagtacgcctgcggcaactttcttctgcacggacgcaggaagattcagcagacgcaatgtgttcgcgatttgcggtcgtgatttcgagatcgacttggatagttcagcctgagtcaggccgaagtcatcaatcatctgctgatatgccgccgcctcttccagaggattcagtgcgacgcgatgaaggttctccagcagcgcatcacgcagcatctcgtcatctgatgtggttttgacaatcgccggaatcgtcttcagttgtgcaatttgtgatgcacgccagcgacgctcgcccataatgagttcgtatctctgtgatgtttcacgtgaaacatcactcttgctggactccccagcctgacgcttgcgaaccacgatcggctgcaatacgccgacttccatgatggacgcggccaactcattcagctcttcctcatcaaagacgctgcgcggctgctgcgcattcggaacgatggagctgacaggaatatccagcagatagccaccctcgacaggcttcaattctggagtttccttattatccttctccttgccggatgcctttgtgctctcggaacgctgagccggctgcgttttcttggaatcgctcgtcccctgtgctgttgctccgaaaaacatgtcactggggtgtgccatatcactgataccgggcatggcaacgcgcttgccgctcttgggcttctctaccgttgtggacttatgtacggcaggaatggaatccttcatggccggaatggtcttacgcttgatttcgccaagacgaaccggagcggtagactcactgtgttgttcagtaccgctcttatgggattcgaccttctctggtgcagccgcagctttctcttgaggggctttcttgttggctgtcgtctcctcggattcgagatcaacacccaattgctgctgttccgcatgagctgttttcggctcaccgggaagtgcggggaacagcgcacccaatcctttacccaaacgtgattttgaggtcattggttactctcccctcttcgcgtcaattgcagccagcaccgaaggcgatcgacgggcgatttccaaggccgcttcgccataggcactcgctcccattccacgcgggtcatagctgatgactgtctttccgaaacttggagcctcggatatttttaccgtacggggaatcgtcgtatccagaacgatactcggatagtgactcttcacctctgagaacacttccctgctgagcaatgttcgtttatcaaacatagtgaccagcatagtcgacacagtcaaattagggttatagtgctcctgcaccaatcctatggtattgataagttgaccaagcccctccaaggcatagtattcagcttggatcggaatcaacatctcagacaccgcgcacatggagttgatgaccaacaggccaagactcggcgggcaatcgaccagaacatagtcataatgattgttcggatcctgcaggaatgattcgacggcttccttcagcagattgttgcgattcggcagatccgccacttccagttccgcacccgaaagttcaatggaagcgggaaccacatcgagccctgggatatcaggacaggttttcagtacctctccgattgtcattcgtccctcaagaacgtcatataccgaaggatcgctggtgccgtgaggaacaccgcatgccgtagaggcgttcccctggggatccatatcgatgaccagcacgtgagctccgtgagaggcgagagctgcggcaatattcaccgttgttgtcgtcttgccgacgccgcctttctggttggcgacggccaggcatcgggttctcgatggcagggggaacaatgcggcattcaggcgttcatagcgtgacgcctcatctgcaatctcggcacccaaagaggaaccatcattctcgaaaatccttctgaccgtttcagaagcagattccatggcaggaatcgcagaggattcctgtgaatcattggatgtcatagtccctcctaaaaaacgaacaacatataatttttcctagtcgtatggacatctcaagttgtgcacagcaatgtggataactgtggataagtatagtgcattagtgtgtgaacacttcgatcaacactagataaaccgtttatttccgccattttcttaatgtggattacatgtcgcaaataatgtggataactttgtgtactgtttgaaattgtggataactccattcttgcgaaaccatcgctttcgtgtttgacatccattgtttcacgtgaaacaatgttcggacagtcagcgatgtcgatgaagatatatcagtattgtttatgcgctcaaaggcaatggatatcgtccgtctcgccccgcaatccaacctcccacagcggaagcagaattacgattcccgtcagcgggagcatgggattatcgtgtgactctcacacatgggagccacacgataattagcgcttgtcgacgagaacgacgtgcgtggattcgagaccgggagctactggagcttcaacgacacgagcacgcactcccccggcatgggaaatttgatgcttcgccttttcaatctcagcctgcgccgaacggcctttcaatgcgaccagtcgaccttgagggcgaagcagaggcaacgtccaaccggcaagcttggtcattggcgccactgctcgacaggtcactacagagaatggtttcaattcaccttcgtggtgcttgatacgatcgatgacttcgtcggaacgtgcgcgaataatcgtaacattctgcaggtccatgtcatccacgcactcttgcaaccattcgacacgacgttccatgggctcaatgagtgtaaacgcacaatccggcatgcatgctgccgcaacgattccagggaaaccgccgccactgccaacatcggcaatggtctttgccttgcttcgatcggtgacttcccgaatgaacgggacgcatgcggcggagttgaggatatgacgttcccagatgatggatatgtcgcgtgggcctatcaatccacgcaactcaccctcgcgggatagtttcacgtgaaacacttcgagcttgtcgtatgcttcgcccaatgcctcacgaactattgcggaatcatctagctcatcaccagatgtttcacgtgaaacaatatcgctcactcttcactaccttcatcgacgtcggattcatcggcgctgctcttcatgtagatggtgacatagcgacgcggctcttcaccgtgagaacgagacttcagcccctcctcgcgaaccacatcatgaatgaccttgcgctcgaacgaattcatcggtttcaaatcaacgggctcaccagtgtcatgcacttcatcaatggcatcaagtgcaatgtcacgaagacgctgacgcttgcgcttcaggaacccgtcaacatcaacaatcagatgcgagcgttcgccggtcttctgctgaacagcaagccgggtaagctgctgcaaagcatcgaccacttcaccattgcaaccaatgagatgcttgatatccgtatcgtcatcagcgatgatctgcaccatcggacgaccgttgcgaacacccatctcgatatcgccttcgtaatcggcgatgtccaataagccttccaagtagtcggcggcgatgtcagcttcttcattgagctgatcgatcgtcgtggtctcctcctgcgccatatcaccactcctttaagcgagtattacttccatagtgtaaaaaaaggaaacctcacggtcaaatagaggtttccaatcgtgtcactttttcttgcgattcttccgctggggctgcttgcgctggtatccccgctccagacgaacagcggcttcctggcgcgccttctccagttcctcttcctcaatcgaaagctgtccggccttggcgcgacgagcattctcctgacgatgatctcgaatctccttttcctcagctgcacgggaacccggagtcgggaacttgtacacctggaacaaggaacgggcaaggttgcatgcattgttggtcagccagtacaccagcacggcgaacgggaacatgatgccggagaagatgtacatgatcgggaagccccaggtcatggcctgctgcatcttgtacgtggatccctgcatcgaagccttggggaggttcttgcgcatgttgttgaactgcatgtaccacatgcatgcgcacatcaacaggatgaagaagccgatgacgacctttccggaattgttggccgtaccgaaggtatcggtgacgctgacaccgaagacgcgggtttgcgcgaactgctcggcagtcgcctgatcgaatgcgccaagcgctcccctcttgccggtcgcgatatacggaatggcggaaagcatgtagaacatgcacatgaacacaggaccctgaatgacggcggtccaacacgaccccatggggttggcgtcattgtcctggtagagcttcatcatctcacggctcatggcctctttgctggcctgatcctttttgcccttgtacttgttctgaatatgctgcatcttgggctgcaaggcctgcatcttgcgcatcgacttcatctgcttgagataaatcggcaaaatacaggcgtgcaccacgagcacaaggaacacgatcgccagcacccaagagatgccgatcggtgccatgcccagcagggtgaggaacttatggaacaggaccatgacctgggtcatgagccactcaagtggggtcagcagcttatacagccagccccaaatgcctctgtcaagaagaaattctccggaagtgttcatcaggccatctccttaatcatcggccattggtgtgagtcgaggcttctcatatgccttcgaccagcgaaatctgtagcacagtgaaaaatgttgcggaacatcatcgatgccgccacgactccaagggttgcagcgaagaaaacgccaaataaacagcacgattcctcttaccgcgccgaagcgccgaaccgcagtgatcgcgtaatgtgagcaactcggatagtacttgcagcatggcggcgttttcgccgaaatggccctctggtaccacttgatcatgccgataagcgccgatccgatggctgacatcagcgactcaccctgcgttcatgcgtagtcgtgactttggcgaagcaacgggaaaactgtcggtcaaggtcagcgaaatcgacacgcgatgcgctgggtttggctctcacgacgatatcgcactgcatcggaagcatatcttcatatcgtcttgcgagcacacgaaatcgacgcttcacacgattacgcgttacagcgttaccaacagccttgctgacggcaagtcccatacgtctcatgatatccgcagatgcctgaacatcacgggtatcgtcatgcaccacaaagtgcacgacgatatccgaatccgtcaccttgaagcgacgcttcagcactgcgatgaagtcacgatggcttttcagccgcttcactcgccttcgtcacctaccgcaatcaggcggacagagacttacgtcccttgttacggcggcggttgatcatcgcgcggccggaacgggtgcgcatgcgcacgcggaaaccatgcttcatcgagcgacggcggttgttgggctggaatgtcctcttcatagttatgctcccggtttttgccatgctgatgcacggctctcatgagtcaagctctataacggtactctgagccatgcccaaaaatcaaaatgaaaacaatttcttcacgatttatcagtgtgtcgtgccccttgcagagcagcggaaaacattggaaacacgccaaaacatgtagaaaagttatccacaaattacatgaatgttattcacaattgaggcgacacaacacgctaagctgtggataacttggctaaagtggagtacatatatcctgttgttgttgtacttattatagctaccgtagcgtatccgctgcggtgcgcaccggcacacatacctgaaggaggtcaca
